(19) United States
(12) Patent Application Publication
(10) Pub. No.: US 2022/0275456 A1
(43) Pub. Date: Sep. 1, 2022

(54) DIFFERENTIATION MARKER GENE SET, METHOD, AND KIT FOR DIFFERENTIATING OR CLASSIFYING SUBTYPE OF BREAST CANCER

(71) Applicant: PUBLIC UNIVERSITY CORPORATION FUKUSHIMA MEDICAL UNIVERSITY, Fukushima-city, Fukushima (JP)

(72) Inventors: Shinya WATANABE, Fukushima-city, Fukushima (JP); Junichi IMAI, Fukushima-city, Fukushima (JP); Emi ITO, Fukushima-city, Fukushima (JP); Toru OTAKE, Fukushima-city, Fukushima (JP); Noriko ABE, Fukushima-city, Fukushima (JP); Kazunoshin TACHIBANA, Fukushima-city, Fukushima (JP)

(21) Appl. No.: 17/628,006

(22) PCT Filed: Jul. 16, 2020
(86) PCT No.: PCT/JP2020/027649

§ 371 Date: Jan. 18, 2022

(30) Foreign Application Priority Data
Jul. 19, 2019 (JP) 2019-134181

(51) Int. Cl. C12Q 1/6886

(52) U.S. Cl. CPC C12Q 1/6886; C12Q 2600/112; C12Q 2600/156; C12Q 2600/158; C12Q 1/6874

(57) ABSTRACT

To provide a differentiation marker gene set which, in the differentiation or classification of a breast cancer subtype, can perform differentiation or classification with high reproducibility by gene expression analysis.

The above-described problem is solved by a differentiation marker gene set for differentiating or classifying a subtype of breast cancer. The differentiation marker gene set comprises a combination of genes obtained by selecting at least one gene from each gene group of at least one gene group selected from gene groups composed of groups a to o, the at least one gene group being selected in accordance with a desired subtype to be differentiated or classified.

### FIELD OF THE INVENTION

[0001] The present invention relates to a gene marker set, a method, and a kit for differentiating or classifying a subtype of breast cancer.

### DESCRIPTION OF THE BACKGROUND ART

[0002] Breast cancer is not a homogeneous disease and is classified into a plurality of subtypes having various characteristics. A precursor to this subtype classification is “intrinsic subtype” reported by Perou et al. in 2000 (Non-Patent Document 1). The authors selected genes having greater variation in expression before and after doxorubicin treatment of 20 breast cancer tissues and between two different tumors in primary lesions and metastatic lymph nodes, and created an intrinsic gene set of 496 genes. Cluster analysis of 65 cases of breast cancer was conducted using this intrinsic gene set of 496 genes, and the subtypes were classified into ER+/luminal-like with high expressions of ESR1, GATA3, and other luminal genes, basal-like with a high expression of the polymeric cytokeratin (5/6/17) gene, and HER2-enriched with a high expression of the ERBB2 gene.

[0003] In 2001, the same group increased the number of target cases to 85 and examined and subclassified the cases into luminal A/B/C, ERBB2, basal-like, and normal breast-like on the basis of biological properties (Non-Patent Document 2). With prognosis and drug sensitivity differing depending on the type, this classification has the advantage of potentially being an indicator of drug therapy selection. Thus, this classification has become a prototype of the subtype classification currently used in clinical practice.

[0004] For the “intrinsic subtype,” an alternative method using an immunohistochemical technique has been developed to facilitate use in clinical practice. At the 2011 St. Gallen Consensus Conference, the following alternative intrinsic subtype classifications based on ER/PgR/HER2/Ki67 information obtained by general pathological examinations mainly based on immunohistochemical methods were adopted, and basically passed down through the same conference in 2013 and 2015.

[0005] (1) Luminal A-like: Produced from lumen (luminal epithelium), is estrogen receptor (ER) positive, and has a high degree of differentiation. Hormone therapy is effective, resulting in a high possibility that chemotherapy is unnecessary.

[0006] (2) Luminal B-like: ER positive and seemingly quiet at first, but has a high Ki-67 proliferation marker, includes cases of HER-2 positive, and has high malignancy.

[0007] (3) HER-2-enriched: ER negative and HER-2 positive; humanized anti-HER2 monoclonal antibodies and trastuzumab (Herceptin) are highly effective.

[0008] (4) Basal-like: A triple negative breast cancer that is ER negative, HER-2 negative, progesterone receptor (PgR) negative, and has a high histological grade; chemotherapy is effective.

[0009] If the alternative classifications are used, the convenience of being able to imagine the ER/PgR/HER2/Ki67 state and even the treatment policy has an effect, and alternative classification names such as ‘luminal A-like’ are very commonly heard in routine medical care, even in Japan. However, essentially the intrinsic subtype is just a classification based on gene expression analysis and does not necessarily match the alternative classification. Further, although both Ki67 and PgR are considered necessary for alternative classification, setting cutoff values thereof at each facility is recommended and, for Ki67, no firm standard has been globally set for the evaluation method itself. Under such circumstances, there are many scenarios in which it is difficult to apply an alternative definition in clinical practice. Although alternative classification names are becoming more common in routine medical care, the medical care actually carried out is basically in consideration of the ER/PgR/HER2 (and in some cases Ki67) state and the risk based on conventional clinicopathological information, and thus there is essentially no significant change from before the introduction of the intrinsic subtype. Further, the intrinsic subtype itself by gene expression analysis is not at the stage that allows use in clinical practice from the standpoint of reproducibility and the like. From these perspectives, when using an intrinsic subtype alternative definition, it is necessary to keep in mind that the definition is convenient and conceptual and, furthermore, to pay close attention to whether this alternative definition will continue to be used in the future.

### PRIOR ART DOCUMENTS

### Non Patent Document

[0010] Non-Patent Document 1: Perou C M et al., Nature 406: 747-752, 2000

[0011] Non-Patent Document 2: Sorlie T et al., Proc Natl Acad Sci 98 (19), 10869-74, 2001

### SUMMARY OF THE INVENTION

### Problems to be Solved by the Invention

[0012] The problem of the present invention is to provide a differentiation marker gene set which, in the differentiation or classification of a breast cancer subtype, can perform differentiation or classification with high reproducibility by gene expression analysis, and a method of differentiating or classifying a breast cancer subtype that uses the gene set.

### Means for Solving the Problems

[0013] In order to solve the above-described problems, the present inventors acquired the gene expression profiles of 14,400 genes from each specimen of 470 cases including breast cancer tissue (453 cases) and normal mammary gland tissue (17 cases), and succeeded in identifying genes that exhibit characteristic behavior of each breast cancer subtype and can differentiate or classify the breast cancer subtype, leading to the completion of the present invention.

[0014] That is, the present invention includes the following aspects.

[0015] The present invention, according to one aspect, relates to

[0016] [1] a method of differentiating or classifying a subtype of breast cancer in a test sample, the method comprising:

[0017] (a) a step of measuring, in the test sample, expression levels of genes included in a differentiation marker gene set for differentiating or classifying a subtype of breast cancer; and

[0018] (b) a step of differentiating or classifying whether the test sample is a desired subtype to be differentiated or classified from the expression levels of the genes included in

[0019] the differentiation marker gene set thus measured, the differentiation marker gene set including a combination of genes obtained by selecting at least one gene from each gene group of at least one gene group selected from gene groups composed of groups a to o shown in the tables below, and

[0020] the at least one gene group being selected in accordance with the desired subtype to be differentiated or classified.

TABLE 1A

| Gene group | Gene symbol |
|---|---|
| Group a | KRTDAP |
| | SERPINB3 |
| | SPRR2A |
| | SPRR1B |
| | KLK13 |
| | KRT1 |
| | LGALS7 |
| | PI3 |
| Group b | SERPINH1 |
| | SNAI2 |
| | GPR173 |
| | HAS2 |
| | PTH1R |
| | PAGE5 |
| | ITLN1 |
| | SH3PXD2B |
| Group c | TAP1 |
| | FN1 |
| | CTHRC1 |
| | MMP9 |
| Group d | ADIPOQ |
| | CD36 |
| | G0S2 |
| | GPD1 |
| | LEP |
| | LIPE |
| | PLIN1 |
| | CAVIN2 |
| | LIFR |
| | TGFBR3 |
| Group e | CAPN6 |
| | PIGR |
| | KRT15 |
| | KRT5 |
| | KRT14 |
| | DST |
| | WIF1 |
| | SYNM |
| | KIT |
| Group f | GABRP |
| | SFRP1 |
| | ELF5 |
| | MIA |
| | MMP7 |
| | FDCSP |
| Group g | CRABP1 |
| | PROM1 |
| | KRT23 |
| | S100A1 |
| | WIPF3 |
| | CYYR1 |
| | TFCP2L1 |
| | DSC2 |
| | MFGE8 |
| | KLK7 |
| | KLK5 |
| | DSG3 |
| | TTYH1 |
| | SCRG1 |
| | S100B |
| | ETV6 |
| | OGFRL1 |
| | METLF |
| | HORMAD1 |
| | PKP1 |
| | FOXC1 |
| | ITGB8 |
| | VGLL1 |
| | ART3 |
| | EN1 |
| | SPHK1 |
| | TRIM47 |
| | COL27A1 |
| | RFLNA |
| | RASD2 |
| | A2ML1 |
| | MARCO |
| | TSPYL5 |
| | TM4SF1 |
| | FABP5 |
| Group h | SPIB |
| | BCL2A1 |
| | MZB1 |
| | KCNK5 |
| | LMO4 |
| | RNF150 |
| | LYZ |
| Group i | C21orf58 |
| | ATP13A5 |
| | NUDT8 |
| | HSD17B2 |
| | ABCA12 |
| | ENPP3 |
| | WNT5A |
| | MPP3 |
| | VPS13D |
| | PXMP4 |
| | GGT1 |
| | TRPV6 |
| | MAB21L4 |
| | CLDN8 |
| | LBP |

TABLE 1B

| Gene group | Gene symbol |
|---|---|
| Group i | SRD5A3 |
| | PAPSS2 |
| | TMEM45B |
| | CLCA2 |
| | FASN |
| | MPHOSPH6 |
| | NXPH4 |
| | HPGD |
| | KYNU |
| | GLYATL2 |
| | KMO |
| | SRPK3 |
| | THRSP |
| | PLA2G2A |
| | TFAP2B |
| | FABP7 |
| | SLPI |
| | SERHL2 |
| | S100A9 |
| | KRT7 |
| | TMEM86A |
| | MBOAT1 |
| Group j | PGAP3 |
| | STARD3 |
| | ERBB2 |
| | MIEN1 |
| | GRB7 |
| Group k | GSDMB |
| | ORMDL3 |
| | MED24 |
| | MSL1 |
| | CASC3 |
| | WIPF2 |
| Group I | THSD4 |
| | MAPT |
| | LONRF2 |
| | TCEAL3 |
| | DBNDD2 |
| | FGD3 |
| | GFRA1 |
| | PARD6B |
| | STC2 |
| | SLC39A6 |
| | ENPP5 |
| | ZNF703 |
| | EVL |
| | TBC1D9 |
| | CHAD |
| | GREB1 |
| | HPN |
| | IL6ST |
| | GASK1B |
| | CA12 |
| | KCNE4 |
| | NAT1 |
| | CYP2B6 |
| | (CYP2B7P) |
| | ARMT1 |
| | MAGED2 |
| | CELSR1 |
| | INPP5J |
| | PADI2 |
| | PPP1R1B |
| Group m | ESR1 |
| Group n | MLPH |
| | FOXA1 |
| | XBP1 |
| | GATA3 |
| | ZG16B |
| | KIAA0040 |
| | TMC4 |
| | AGR2 |
| | TFF3 |
| | SCGB2A2 |
| | MUCL1 |
| Group o | DDX11 |
| | ATAD2 |
| | GGH |
| | CDCA3 |
| | CCNA2 |
| | CCNB2 |
| | ANLN |
| | UBE2C |
| | CKS2 |
| | MKI67 |
| | FOXM1 |
| | UBE2T |
| | MCM4 |
| | CKAP2 |
| | JPT1 |
| | KPNA2 |
| | H2AFX |
| | H2AFZ |
| | CDK1 |
| | PTTG1 |
| | CDC20 |
| | MYBL2 |
| | RRM2 |

[0021] Here, the method of differentiating or classifying a subtype of breast cancer in a test sample of the present invention is, in one embodiment,

[0022] [2] the method of differentiating or classifying according to [1] described above,

[0023] the step (b) being a step of differentiating or classifying a subtype of the test sample by acquiring an expression profile of the differentiation marker gene set from the expression levels of the genes thus measured, and comparing the expression profile thus acquired and an expression profile of a corresponding differentiation marker gene set in a sample derived from a breast cancer patient having the desired subtype to be differentiated or classified.

[0024] Further, the method of differentiating or classifying a subtype of breast cancer in a test sample of the present invention is, in one embodiment,

[0025] [3] the method of differentiating or classifying according to [2] described above,

[0026] in the step (b), the expression profile thus acquired and the expression profile of a corresponding differentiation marker gene set in the sample derived from a breast cancer patient having the desired subtype to be differentiated or classified being compared, and

[0027] the test sample being evaluated as being breast cancer of the subtype thus compared when having an expression profile equivalent to the expression profile of the sample thus compared, or being evaluated as not being breast cancer of the subtype thus compared when having an expression profile of genes different from the expression profile of the sample thus compared.

[0028] Further, the method of differentiating or classifying a subtype of breast cancer in a test sample of the present invention is, in one embodiment,

[0029] [4] the method of differentiating or classifying according to [2] described above,

[0030] comparison with the expression profile of the corresponding differentiation marker gene set in a sample derived from a breast cancer patient having the desired subtype to be differentiated or classified in the step (b) being performed by cluster analysis.

[0031] Further, the method of differentiating or classifying a subtype of breast cancer in a test sample of the present invention is, in one embodiment,

[0032] [5] the method of differentiating or classifying according to [2] described above,

[0033] in the step (b), the differentiating or classifying being performed by comparing the expression profile thus acquired with a predetermined threshold value.

[0034] Further, the method of differentiating or classifying a subtype of breast cancer in a test sample of the present invention is, in one embodiment,

[0035] [6] the method of differentiating or classifying according to [2] described above,

[0036] the step (b) being a step of differentiating or classifying whether the test sample is the desired subtype to be differentiated by calculating a subtype differentiation score from the expression levels of the genes included in the gene set thus measured.

[0037] Further, the method of differentiating or classifying a subtype of breast cancer in a test sample of the present invention is, in one embodiment,

[0038] [7] the method of differentiating or classifying according to [6] described above,

[0039] the subtype differentiation score in the step (b) being determined on the basis of the expression levels of genes included in each gene group selected in accordance with the desired subtype to be differentiated, or an average value thereof.

[0040] Further, the method of differentiating or classifying a subtype of breast cancer in a test sample of the present invention is, in one embodiment,

[0041] [8] the method of differentiating or classifying according to any one of [1] to [7] described above,

[0042] the desired subtype being a subtype selected from a group composed of luminal A, luminal B (HER2 positive), luminal B (HER2 negative), HER2 positive, HER2 positive-like, triple negative, phyllodes tumor, squamous cell carcinoma, normal-like, normal, and undeterminable.

[0043] Further, the method of differentiating or classifying a subtype of breast cancer in a test sample of the present invention is, in one embodiment,

[0044] [9] the method of differentiating or classifying according to any one of [1] to [8] described above,

[0045] the at least one gene group selected in accordance with the desired subtype to be differentiated in the step (a) being

[0046] (i) the group 1 and the group m for calculating a hormone sensitivity score, the group o for calculating a cell cycle score, and the group j and the group k for calculating a HER2 amplification score when the desired subtype is luminal A,

[0047] (ii) the group j and the group k for calculating the HER2 amplification score, and the group 1 and the group m for calculating the hormone sensitivity score when the desired subtype is luminal B (HER2 positive),

[0048] (iii) the group j and the group k for calculating the HER2 amplification score, the group 1 and the group m for calculating the hormone sensitivity score, and the group o for calculating the cell cycle score when the desired subtype is luminal B (HER2 negative),

[0049] (iv) the group j and the group k for calculating the HER2 amplification score, the group 1 and the group m for calculating the hormone sensitivity score, or the group i for calculating a HER2-like score when the desired subtype is HER2 positive,

[0050] (v) the group i for calculating the HER2-like score, and the group j and the group k for calculating the HER2 amplification score when the desired subtype is HER2 positive-like,

[0051] (vi) the group f, the group g, the group h, and the group n for calculating a triple negative score when the desired subtype is triple negative,

[0052] (vii) the group b for calculating a phyllodes tumor score when the desired subtype is phyllodes tumor,

[0053] (viii) the group a for calculating a squamous cell score when the desired subtype is squamous cell carcinoma,

[0054] (ix) the group a to the group o for calculating a cancer score and all other scores when the desired subtype is undeterminable,

[0055] (x) the group e for calculating a normal-like score, the group o for calculating the cell cycle score, and the group c and the group d for calculating the cancer score when the desired subtype is normal-like, or

[0056] (xi) the group c and the group d for calculating the cancer score when the desired subtype is normal.

[0057] Further, the method of differentiating or classifying a subtype of breast cancer in a test sample of the present invention is, in one embodiment,

[0058] [10] the method of differentiating or classifying according to any one of [1] to [9] described above,

[0059] the desired subtypes being luminal A and B, HER2 positive-like, HER2 positive, and triple negative, and

[0060] the differentiation marker gene set including a combination of genes obtained by selecting at least one gene from each gene group of the group f, the group g, the group i, the group j, the group k, the group 1, the group m, the group n, and the group o.

[0061] Further, the method of differentiating or classifying a subtype of breast cancer in a test sample of the present invention is, in one embodiment,

[0062] [11] the method of differentiating or classifying according to any one of [1] to [10] described above,

[0063] the differentiation marker gene set including all genes included in each gene group of a plurality of the gene groups thus selected.

[0064] Further, the method of differentiating or classifying a subtype of breast cancer in a test sample of the present invention is, in one embodiment,

[0065] [12] the method of differentiating or classifying according to any one of [1] to

[0066] [11] described above,

[0067] the differentiation marker gene set further including at least one gene selected from a control group composed of ABCF3, FBXW5, MLLT1, FAM234A, PITPNM1, WDR1, NDUFS7, and AP2A1.

[0068] Further, the present invention, according to another aspect, relates to

[0069] [13] a differentiation marker gene set for differentiating or classifying a subtype of breast cancer, the differentiation marker gene set comprising:

[0070] a combination of genes obtained by selecting at least one gene from each gene group of at least one gene group selected from gene groups composed of groups a to o shown in the tables below,

[0071] the at least one gene group being selected in accordance with a desired subtype to be differentiated or classified.

TABLE 2A

| Gene group | Gene symbol |
|---|---|
| Group a | KRTDAP |
| | SERPINB3 |
| | SPRR2A |
| | SPRR1B |
| | KLK13 |
| | KRT1 |
| | LGALS7 |
| | PI3 |
| Group b | SERPINH1 |
| | SNAI2 |
| | GPR173 |
| | HAS2 |
| | PTH1R |
| | PAGE5 |
| | ITLN1 |
| | SH3PXD2B |
| Group c | TAP1 |
| | FN1 |
| | CTHRC1 |
| | MMP9 |
| Group d | ADIPOQ |
| | CD36 |
| | G0S2 |
| | GPD1 |
| | LEP |
| | LIPE |
| | PLIN1 |
| | CAVIN2 |
| | LIFR |
| | TGFBR3 |
| Group e | CAPN6 |
| | PIGR |
| | KRT15 |
| | KRT5 |
| | KRT14 |
| | DST |
| | WIF1 |
| | SYNM |
| | KIT |
| Group f | GABRP |
| | SFRP1 |
| | ELF5 |
| | MIA |
| | MMP7 |
| | FDCSP |
| Group g | CRABP1 |
| | PROM1 |
| | KRT23 |
| | S100A1 |
| | WIPF3 |
| | CYYR1 |
| | TFCP2L1 |
| | DSC2 |
| | MFGE8 |
| | KLK7 |
| | KLK5 |
| | DSG3 |
| | TTYH1 |
| | SCRG1 |
| | S100B |
| | ETV6 |
| | OGFRL1 |
| | MELTF |
| | HORMAD1 |
| | PKP1 |
| | FOXC1 |
| | ITGB8 |
| | VGLL1 |
| | ART3 |
| | EN1 |
| | SPHK1 |
| | TRIM47 |
| | COL27A1 |
| | RFLNA |
| | RASD2 |
| | A2ML1 |
| | MARCO |
| | TSPYL5 |
| | TM4SF1 |
| | FABP5 |
| Group h | SPIB |
| | BCL2A1 |
| | MZB1 |
| | KCNK5 |
| | LMO4 |
| | RNF150 |
| | LYZ |
| Group i | C21orf58 |
| | ATP13A5 |
| | NUDT8 |
| | HSD17B2 |
| | ABCA12 |
| | ENPP3 |
| | WNT5A |
| | MPP3 |
| | VPS13D |
| | PXMP4 |
| | GGT1 |
| | TRPV6 |
| | MAB21L4 |
| | CLDN8 |
| | LBP |

TABLE 2B

| Gene group | Gene symbol |
|---|---|
| Group i | SRD5A3 |
| | PAPSS2 |
| | TMEM45B |
| | CLCA2 |
| | FASN |
| | MPHOSPH6 |
| | NXPH4 |
| | HPGD |
| | KYNU |
| | GLYATL2 |
| | KMO |
| | SRPK3 |
| | THRSP |
| | PLA2G2A |
| | TFAP2B |
| | FABP7 |
| | SLPI |
| | SERHL2 |
| | S100A9 |
| | KRT7 |
| | TMEM86A |
| | MBOAT1 |
| Group j | PGAP3 |
| | STARD3 |
| | ERBB2 |
| | MIEN1 |
| | GRB7 |
| Group k | GSDMB |
| | ORMDL3 |
| | MED24 |
| | MSL1 |
| | CASC3 |
| | WIPF2 |
| Group l | THSD4 |
| | MAPT |
| | LONRF2 |
| | TCEAL3 |
| | DBNDD2 |
| | FGD3 |
| | GFRA1 |
| | PARD6B |
| | STC2 |
| | SLC39A6 |
| | ENPP5 |
| | ZNF703 |
| | EVL |
| | TBC1D9 |
| | CHAD |
| | GREB1 |
| | HPN |
| | IL6ST |
| | GASK1B |
| | CA12 |
| | KCNE4 |
| | NAT1 |
| | CYP2B6 (CYP2B7P) |
| | ARMT1 |
| | MAGED2 |
| | CELSR1 |
| | INPP5J |
| | PADI2 |
| | PPP1R1B |
| Group m | ESR1 |
| Group n | MLPH |
| | FOXA1 |
| | XBP1 |
| | GATA3 |
| | ZG16B |
| | KIAA0040 |
| | TMC4 |
| | AGR2 |
| | TFF3 |
| | SCGB2A2 |
| | MUCL1 |
| Group o | DDX11 |
| | ATAD2 |
| | GGH |
| | CDCA3 |
| | CCNA2 |
| | CCNB2 |
| | ANLN |
| | UBE2C |
| | CKS2 |
| | MKI67 |
| | FOXM1 |
| | UBE2T |
| | MCM4 |
| | CKAP2 |
| | JPT1 |
| | KPNA2 |
| | H2AFX |
| | H2AFZ |
| | CDK1 |
| | PTTG1 |
| | CDC20 |
| | MYBL2 |
| | RRM2 |

[0072] Here, the differentiation marker gene set of the present invention is, in one embodiment,

[0073] [14] the differentiation marker gene set according to [13] described above,

[0074] the desired subtype being a subtype selected from a group composed of luminal A, luminal B (HER2 positive), luminal B (HER2 negative), HER2 positive, HER2 positive-like, triple negative, phyllodes tumor, squamous cell carcinoma, normal-like, normal, and undeterminable.

[0075] Further, the differentiation marker gene set of the present invention is, in one embodiment,

[0076] [15] the differentiation marker gene set according to [13] or [14] described above,

[0077] the at least one gene group being

[0078] (i) the group 1 and the group m for calculating a hormone sensitivity score, the group o for calculating a cell cycle score, and the group j and the group k for calculating a HER2 amplification score when the desired subtype is luminal A,

[0079] (ii) the group j and the group k for calculating the HER2 amplification score, and the group 1 and the group m for calculating the hormone sensitivity score when the desired subtype is luminal B (HER2 positive),

[0080] (iii) the group j and the group k for calculating the HER2 amplification score, the group 1 and the group m for calculating the hormone sensitivity score, and the group o for calculating the cell cycle score when the desired subtype is luminal B (HER2 negative),

[0081] (iv) the group j and the group k for calculating the HER2 amplification score, the group 1 and the group m for calculating the hormone sensitivity score, or the group i for calculating a HER2-like score when the desired subtype is HER2 positive,

[0082] (v) the group i for calculating a HER2-like score, and the group j and the group k for calculating the HER2 amplification score when the desired subtype is HER2 positive-like,

[0083] (vi) the group f, the group g, the group h, and the group n for calculating a triple negative score when the desired subtype is triple negative,

[0084] (vii) the group b for calculating a phyllodes tumor score when the desired subtype is phyllodes tumor,

[0085] (viii) the group a for calculating a squamous cell score when the desired subtype is squamous cell carcinoma,

[0086] (ix) the group a to the group o for calculating a cancer score and all other scores when the desired subtype is undeterminable,

[0087] (x) the group e for calculating a normal-like score, the group o for calculating the cell cycle score, and the group c and the group d for calculating the cancer score when the desired subtype is normal-like, or

[0088] (xi) the group c and the group d for calculating the cancer score when the desired subtype is normal.

[0089] Further, the differentiation marker gene set of the present invention, in one embodiment, relates to

[0090] [16] the differentiation marker gene set according to any one of [13] to [15] described above, the differentiation marker gene set comprising:

[0091] a combination of genes obtained by selecting at least one gene from each gene group of nine gene groups composed of the group f, the group g, the group i, the group j, the group k, the group 1, the group m, the group n, and the group o.

[0092] Further, the differentiation marker gene set of the present invention is, in one embodiment,

[0093] [17] the differentiation marker gene set according to any one of [13] to [15] described above, the differentiation marker gene set comprising:

[0094] a combination of genes obtained by selecting at least one gene from each gene group of

[0095] 15 gene groups composed of the groups a to o.

[0096] Further, the differentiation marker gene set of the present invention is, in one embodiment,

[0097] [18] the differentiation marker gene set according to any one of [13] to [17] described above, the differentiation marker gene set further comprising:

[0098] at least one gene selected from a control group composed of ABCF3, FBXWS, MLLT1, FAM234A, PITPNM1, WDR1, NDUFS7, and AP2A1.

[0099] Further, the present invention, according to another aspect, relates to

[0100] [19] a kit for differentiating or classifying a subtype of breast cancer in a test sample, the kit comprising:

[0101] means for measuring expression levels of genes included in the differentiation marker gene set for differentiating or classifying a subtype of breast cancer according to any one of [13] to [18] described above.

[0102] Here, the kit of the present invention is, in one embodiment,

[0103] [20] the kit according to [19] described above,

[0104] the means for measuring expression levels of genes being at least one means selected from a group composed of a primer or a probe for the genes or markers thereof.

[0105] Further, the kit of the present invention is, in one embodiment,

[0106] [21] the kit according to [20] described above, the kit being for a PCR, a microarray, or an RNA sequence.

### EFFECT OF THE INVENTION

[0107] According to a differentiation marker gene set of the present invention, it is possible to differentiate or classify a subtype of breast cancer with high reproducibility by expression analysis of genes included in the differentiation marker gene set.

### BRIEF DESCRIPTION OF THE DRAWINGS

[0108] FIG. 1 shows a heat map of results of cluster analysis by a group-average method based on Euclidean distance for 470 cases by using a differentiation marker gene set of 207 kinds of genes indicated in Example 4 below.

[0109] FIG. 2 shows a heat map of scoring results of subtype differentiation scores for 470 cases by using a differentiation marker gene set of 207 kinds of genes indicated in Example 5 below.

[0110] FIG. 3 shows a heat map of results of cluster analysis by a group-average method based on Euclidean distance for 470 cases by using a differentiation marker gene set of 15 kinds of genes indicated in Example 7 below.

[0111] FIG. 4 shows a heat map of scoring results of subtype differentiation scores for 470 cases by using a differentiation marker gene set of 15 kinds of genes indicated in Example 8 below. It should be noted that the heat map in the upper section of FIG. 4 shows the heat map of FIG. 2 as a comparison.

[0112] FIG. 5 shows a heat map of results of cluster analysis by a group-average method based on Euclidean distance for 470 cases by using a differentiation marker gene set of 161 kinds of genes indicated in Example 9 below.

[0113] FIG. 6 shows a heat map of scoring results of subtype differentiation scores for 470 cases by using a differentiation marker gene set of 161 kinds of genes indicated in Example 10 below.

### DESCRIPTION OF THE PREFERRED EMBODIMENTS

### 1. Differentiation Marker Gene Set for Differentiating or Classifying Subtype of Breast Cancer

### 1-1. Overview

[0114] A first aspect of the present invention is a differentiation marker gene set capable of distinguishing a subtype (histological type) of breast cancer. The differentiation marker gene set of the present invention is constituted by genes selected from a gene group of at least 199 kinds of genes, and makes it possible to classify breast cancer into one of the histological types of luminal A, luminal B (HER2 positive), luminal B (HER2 negative), HER2 positive, HER2 positive-like, triple negative, normal-like, normal, squamous cell carcinoma, phyllodes tumor, and undeterminable by measurement of expression levels of specific genes in the gene group in a sample of a subject.

### 1-2. Definitions

[0115] The term “breast cancer” refers to cancer that usually begins in intraductal tissue such as ducts and lobules. Further, breast cancer refers to any malignant tumor of breast tissue, including carcinoma and sarcoma. Furthermore, breast cancer is a heterogeneous disease and is classified into a plurality of subtypes having various characteristics.

[0116] The subtypes of breast cancer are mainly classified into the 11 types of luminal A, luminal B (HER2 positive), luminal B (HER2 negative), HER2 positive, HER2 positive-like, triple negative, phyllodes tumor, squamous cell carcinoma, normal-like, normal, and undeterminable. In one embodiment, luminal A, luminal B (HER2 positive), and luminal B (HER2 negative) can also be classified into the subtype “luminal A+B” as a group.

[0117] Here, the term “luminal A” refers to a case that clinicopathologically satisfies all of 1) ER positive and PgR negative, 2) HER2 negative, 3) low Ki67 value, and 4) low recurrence risk in MGEA, but in this specification also includes cases in which the gene expression profile is clinicopathologically similar to those of most cases diagnosed as luminal A.

[0118] It should be noted that diagnosis of the clinicopathological subtype is one that mainly confirms the expression of ER, PgR, HER2, and Ki67 by immunohistochemical staining, but is not limited thereto and includes confirmation by gene expression analysis.

[0119] The term “luminal B (HER2 positive)” refers to a case that clinicopathologically is ER positive and HER2 positive, but in this specification also includes cases in which the gene expression profile is clinicopathologically similar to those of most cases diagnosed as luminal B (HER2 positive).

[0120] The term “luminal B (HER2 negative)” refers to a case that clinicopathologically falls under any of 1) ER positive and HER2 negative, 2) high Ki67 value, 3) negative or low PgR, and 4) high recurrence risk in MGEA, but in this specification also includes cases in which the cell cycle-related gene group is more highly expressed than in other cases in luminal A.

[0121] The term “HER2 positive” refers to a case that clinicopathologically is HER2 positive, ER negative, and PgR negative, but in this specification also includes cases in which the gene expression profile is clinicopathologically similar to those of most cases diagnosed as HER2 positive.

[0122] The term “HER2 positive-like” refers to a case in which HER2 is negative, but other gene expression profiles are similar to most of the cases clinicopathologically diagnosed as HER2 positive.

[0123] The term “triple negative” refers to case that clinicopathologically is ER negative, PgR negative, and HER2 negative, but in this specification also includes cases in which the gene expression profile is clinicopathologically similar to most of the cases diagnosed as triple negative.

[0124] The term “squamous cell carcinoma” refers to a cancer produced by the malignant proliferation of cells called epidermal keratinocytes existing in the epidermis, and in this specification refers to cancer originating from the mammary gland.

[0125] The term “phyllodes tumor” refers to a tumor that is clinicopathologically similar to fibroadenoma of the mammary gland, but is produced by rapid growth of fibrous stroma and ductal epithelium in contrast to fibroadenoma in which connective tissue within the lobules of the mammary gland proliferates.

[0126] The term “undeterminable” refers to a case in which the gene expression profile is not similar to any of those of luminal A, luminal B (HER2 positive), luminal B (HER2 negative), HER2 positive, HER2 positive-like, triple negative, normal-like, normal, squamous cell carcinoma, and phyllodes tumor.

[0127] The term “normal-like” refers to a case that is clinicopathologically diagnosed as “cancer,” but has a gene expression profile similar to that of normal mammary gland tissue.

[0128] The term “normal” refers to normal tissue.

[0129] In this specification, the term “differentiation marker gene” is a marker related with a gene included in the “differentiating gene group” and refers to a biomarker capable of differentiating the histological type of breast cancer. In the present invention, the biomarker is particularly a transcription product (mRNA) of each gene included in the differentiating gene group, and is a protein in which the cDNA or each gene is encoded.

[0130] In this specification, “gene expression score” is a score determined by the expression level of each gene or a plurality of genes included in the “differentiating gene group.” The type and calculation method of the score are not particularly limited, and examples include a score (−1≤n≤1) determined by setting a cutoff value of the expression level for each gene and conducting a comparison with the cutoff values.

[0131] In this specification, the “expression level of a gene” means a transcription product amount, an expression intensity, or an expression frequency of a differentiating gene. The expression level of a gene referred to herein is not limited to the expression level of a wild-type gene of the differentiating gene, and may include the expression level of a mutant gene such as a point-mutant gene. Further, the transcription product showing the expression of the differentiating gene may include atypical transcription products (variants) such as splicing variants and fragments thereof. This is because the expression profile of a gene in the present invention can be constructed even with information based on a mutant gene, a transcription product, or a fragment thereof. The expression level of a gene can be obtained as a measured value by measuring the amount of transcription product, that is, mRNA, of the gene groups constituting the differentiation marker gene set, or the like. It should be noted that, in a preferred embodiment, the measurement of the expression level of a gene is the measurement of mRNA.

[0132] Further, in this specification, the term “expression profile” refers to information regarding the expression level of each gene, and particularly refers to information regarding the expression levels of a plurality of genes. Further, the expression profile includes a “subtype differentiation score” and a “gene expression score” determined by the expression level of the differentiation marker.

[0133] In this specification, the “measured value” is a value obtained by a measurement method of the gene expression level. The measured value may be an absolute value in which the amount of mRNA or the like in the sample is expressed by weight such as ng (nanogram) or μg (microgram), or may be a relative value expressed by absorbance with respect to a control value, a fluorescence intensity of a labeled molecule, or the like.

[0134] It should be noted that the measured value of the expression level of each gene depends on the measurement method, but can be calculated as a relative ratio (expression ratio) to a common sample (hereinafter referred to as “common reference”), for example. The common reference when calculating the expression ratio may be any reference as long as the same in the measurement conditions across the samples to be compared. For example, the common reference may be a specific cell line or a mixture of a plurality of cell lines. Alternatively, a commercially available universal reference, a known housekeeping gene, or a combination thereof can be used as the common reference.

[0135] In this specification, the “differentiating or classifying” means differentiating or classifying, for a sample derived from a subject who has a history of breast cancer, the subtype to which the breast cancer belongs, or differentiating or classifying the histological type to which there is a high or low possibility of the cancer belonging.

### 1-3. Configuration

[0136] In this specification, “differentiating gene group” is composed of the ABCF3 gene, FBXW5 gene, MLLT1 gene, FAM234A gene, PITPNM1 gene, WDR1 gene, NDUFS7 gene, AP2A1 gene, KRTDAP gene, SERPINB3 gene, SPRR2A gene, SPRR1B gene, KLK13 gene, KRT1 gene, LGALS7 gene, PI3 gene, SERPINH1 gene, SNAI2 gene, GPR173 gene, HAS2 gene, PTH1R gene, PAGES gene, ITLN1 gene, SH3PXD2B gene, TAP1 gene, FN1 gene, CTHRC1 gene, MMP9 gene, ADIPOQ gene, CD36 gene, GOS2 gene, GPD1 gene, LEP gene, LIPE gene, PLIN1 gene, CAVIN2 gene, LIFR gene, TGFBR3 gene, CAPN6 gene, PIGR gene, KRT15 gene, KRT5 gene, KRT14 gene, DST gene, WIF1 gene, SYNM gene, KIT gene, GABRP gene, SFRP1 gene, ELF5 gene, MIA gene, MMPI gene, FDCSP gene, CRABP1 gene, PROM1 gene, KRT23 gene, S100A1 gene, WIPF3 gene, CYYR1 gene, TFCP2L1 gene, DSC2 gene, MFGE8 gene, KLK7 gene, KLK5 gene, DSG3 gene, TTYH1 gene, SCRG1 gene, S100B gene, ETV6 gene, OGFRL1 gene, MELTF gene, HORMAD1 gene, PKP1 gene, FOXC1 gene, ITGB8 gene, VGLL1 gene, ART3 gene, EN1 gene, SPHK1 gene, TRIM47 gene, COL27A1 gene, RFLNA gene, RASD2 gene, A2ML1 gene, MARCO gene, TSPYL5 gene, TM4SF1 gene, FABP5 gene, SPIB gene, BCL2A1 gene, MZB1 gene, KCNK5 gene, LMO4 gene, RNF150 gene, LYZ gene, C21orf58 gene, ATP13A5 gene, NUDT8 gene, HSD17B2 gene, ABCA12 gene, ENPP3 gene, WNT5A gene, MPP3 gene, VPS13D gene, PXMP4 gene, GGT1 gene, TRPV6 gene, MAB21L4 gene, CLDN8 gene, LBP gene, SRD5A3 gene, PAPSS2 gene, TMEM45B gene, CLCA2 gene, FASN gene, MPHOSPH6 gene, NXPH4 gene, HPGD gene, KYNU gene, GLYATL2 gene, KMO gene, SRPK3 gene, THRSP gene, PLA2G2A gene, TFAP2B gene, FABP7 gene, SLPI gene, SERHL2 gene, S100A9 gene, KRT7 gene, TMEM86A gene, MBOAT1 gene, PGAP3 gene, STARD3 gene, ERBB2 gene, MIEN1 gene, GRB7 gene, GSDMB gene, ORMDL3 gene, MED24 gene, MSL1 gene, CASC3 gene, WIPF2 gene, THSD4 gene, MAPT gene, LONRF2 gene, TCEAL3 gene, DBNDD2 gene, FGD3 gene, GFRA1 gene, PARD6B gene, STC2 gene, SLC39A6 gene, ENPP5 gene, ZNF703 gene, EVL gene, TBC1D9 gene, CHAD gene, GREB1 gene, HPN gene, IL6ST gene, GASK1B gene, CA12 gene, KCNE4 gene, NAT1 gene, CYP2B6 (CYP2B7P) gene, ARMT1 gene, MAGED2 gene, CELSR1 gene, INPP5J gene, PADI2 gene, PPP1R1B gene, ESR1 gene, MLPH gene, FOXA1 gene, XBP1 gene, GATA3 gene, ZG16B gene, KIAA0040 gene, TMC4 gene, AGR2 gene, TFF3 gene, SCGB2A2 gene, MUCL1 gene, DDX11 gene, ATAD2 gene, GGH gene, CDCA3 gene, CCNA2 gene, CCNB2 gene, ANLN gene, UBE2C gene, CKS2 gene, MKI67 gene, FOXM1 gene, UBE2T gene, MCM4 gene, CKAP2 gene, JPT1 gene, KPNA2 gene, H2AFX gene, H2AFZ gene, CDK1 gene, PTTG1 gene, CDC20 gene, MYBL2 gene, and RRM2 gene.

[0137] In this specification, the genes included in the “differentiating gene group” include genes composed of nucleotide sequences including degenerate codons encoding the same amino acid sequence, mutant genes such as various mutants (variants) of individual genes and point-mutant genes, and ortholog genes of organisms of other species such as chimpanzee. Such genes include genes that are composed of a nucleotide sequence of a gene specified by the GenBank accession number shown in the table below and a nucleotide sequence having a base identity of 70% or more (preferably 75% or more, 80% or more, or 85% or more, and more preferably 90% or more, 95% or more, 96% or more, 97% or more, 98% or more, or 99% or more) and retain the function of the target gene.

[0138] For example, in one embodiment, the ABCF3 genes used in the present invention can be specified as genes including the nucleotide sequence indicated by sequence number 1 and, at this time, includes genes that are composed of the nucleotide sequence indicated by sequence number 1 and a nucleotide sequence having a base identity of 70% or more (preferably 75% or more, 80% or more, or 85% or more, and more preferably 90% or more, 95% or more, 96% or more, 97% or more, 98% or more, or 99% or more) and retain the function of the ABCF3 gene. It should be noted that, in this specification, the term “base identity” refers to a percentage (%) of the number of identical bases in nucleotide sequences of nucleotides to be compared with respect to the total number of bases of genes when two nucleotide sequences are aligned, if necessary with a gap such that the degree of matching between both nucleotide sequences is maximized.

[0139] The “differentiating gene group” can be divided into the following groups a to o as gene groups characteristic of each subtype of breast cancer (each group of the groups a to o does not necessarily have a one-to-one correspondence with each subtype). In this specification, the gene group showing an expression pattern characteristic of squamous cell carcinoma is classified as “group a,” the gene group showing an expression pattern characteristic of phyllodes tumor is classified as “group b,” the gene group showing an expression pattern characteristic of cancer is classified as “group c,” the gene group showing an expression pattern characteristic of normal tissue is classified as “group d,” the gene group showing an expression pattern characteristic of normal-like is classified as “group e,” the gene (hereinafter referred to as “TNBC1”) group showing an expression pattern characteristic of the triple negative group and showing an expression pattern characteristic of normal tissue or normal-like is classified as “group f,” the gene (hereinafter referred to as “TNBC2”) group showing an expression pattern characteristic of the triple negative is classified as “group g,” the gene (hereinafter referred to as “TNBC3”) group showing an expression pattern characteristic of the triple negative and similar to the expression pattern of genes defined as undeterminable is classified as “group h,” the gene group showing an expression pattern characteristic of HER2+-like is classified as “group i,” the gene (hereinafter referred to as “HER2 amplification-1”) group related to HER2 amplification and positioned close to the HER2 gene on the chromosome is classified as “group j,” the gene (hereinafter referred to as “HER2 amplification-2”) group related to HER2 amplification other than group j is classified as “group k,” the hormone sensitivity-related gene group is classified as “group 1,” ESR1 genes are classified as “group m,” differentiation-related genes are classified as “group n,” and the cell cycle-related gene group is classified as “group o.” The “differentiating gene groups” classified into groups a to o are shown in Tables 3A to 3G below. Tables 3A to 3G also show the control genes having little variation in gene expression for each subtype. It should be noted that, for one gene (MBOAT1) belonging to group i and two genes (PADI2 and PPP1R1B) belonging to group 1, the appearance of the characteristic thereof increases as the expression ratio decreases. When the MBOAT1 gene is used for differentiation or classification, it is preferable to perform operations as appropriate, such as using an inverted value as the score value.

TABLE 3A

| Classification | | Symbol | Name | ID | Sequence number |
|---|---|---|---|---|---|
| | control | FBXW5 | F-box and WD-40 domain protein 5 (FBXW5), transcript | NM_018998 | Sequence number 1 |
| | | | variant 2, mRNA. | | |
| | control | PITPNM1 | phosphatidylinositol transfer protein, membrane-associated 1 | NM_004910 | Sequence number 2 |
| | | | (PITPNM1), mRNA. | | |
| | control | MLLT1 | myeloid/lymphoid or mixed-lineage leukemia (trithorax | NM_005934 | Sequence number 3 |
| | | | homolog, Drosophila); translocated to 1 (MLLT1), mRNA. | | |
| | control | WDR1 | WD repeat domain 3 (WDR3), transcript variant 1, mRNA. | NM_017492 | Sequence number 4 |
| | control | ABCF3 | ATP-binding cassette, sub family F (GCN [symbol] ), member 3 | NM_018358 | Sequence number 5 |
| | | | (ABCF3), mRNA. | | |
| | control | NDUFS7 | NADH dehydrogenase (ubiquinone) Fe-5 protein 7. 20 | NM_024407 | Sequence number 6 |
| | | | kDa (NADH-coenzyme Q reductase) (NDUFS7), mRNA | | |
| | control | FAM234A | hypothetical protein DRFZp751D0211 (DRFZP761D0211), | NM_032039 | Sequence number 7 |
| | | | mRNA. | | |
| | control | APA1 | adaptor-related protein complex 3, alpha 1 subunit (AP2A1), | NM_130787 | Sequence number 8 |
| | | | transcript variant 3, mRNA. | | |
| Group a | Squamous cell carcinoma | KRTDAP | keratinocyte differentiation-associated protein (KRTDAP), | NM_207392 | Sequence number 9 |
| | | | mRNA. | | |
| | Squamous cell carcinoma | LGALS7 | lectin, galactoside-binding, soluble, 7 (galactin 7) | NM_002307 | Sequence number 10 |
| | | | (LGALS7), mRNA. | | |
| | Squamous cell carcinoma | PI3 | protease inhibitor 3, skin-derived (SKALP) (PI3), mRNA. | NM_00253 [symbol] | Sequence number 11 |
| | Squamous cell carcinoma | SPRR1B | small proline-rich protein 1B (cornifin) (SPRR1B), mRNA. | NM_0031 [symbol] | Sequence number 12 |
| | Squamous cell carcinoma | SPRR2A | small proline-rich protein 2A (SPRR2A), mRNA, | NM_0059 [symbol] | Sequence number 13 |
| | Squamous cell carcinoma | KRT1 | keratin 1 (epidermolytic hyperkeratosis) (KRT1), mRNA. | NM_006131 | Sequence number 14 |
| | Squamous cell carcinoma | SERPINB3 | serine (or cysteine) proteinase inhibitor. clade B | NM_00 [symbol] 919 | Sequence number 15 |
| | | | (ovalbumin), member 3 (SERPINB3), mRNA. | | |
| | Squamous cell carcinoma | KLK13 | kallikrein 13 (KLK13), mRNA. | NM_015596 | Sequence number 16 |
| Group b | Phyllodes tumor | SH3PXD2B | similar to K1AA1295 protein (LOC220775), mRNA. | NM_001017 [symbol] 95 | Sequence number 17 |
| | Phyllodes tumor | PTH1R | parathyroid Hormone receptor 1 (PTHR1), mRNA. | NM_000316 | Sequence number 18 |
| | Phyllodes tumor | SERPINH1 | serine (or cysteine) proteinase inhibitor, clade H (heat | NM_001235 | Sequence number 19 |
| | | | shock protein 47), member 1, (collagen binding protein 1) | | |
| | | | (SERPINH1), mRNA | | |
| | Phyllodes tumor | SNAI2 | snail homolog 2 (Drosophila) (SNAI2) 2R | NM_003068 | Sequence number 20 |
| | Phyllodes tumor | HAS2 | hyaluronan snthase 2 (HAS2), mRNA. | NM_005328 | Sequence number 21 |
| | Phyllodes tumor | ITLN1 | intelectin 1 (galactofuranose binding) (ITLN1), mRNA. | NM_017525 | Sequence number 22 |
| | Phyllodes tumor | GPR173 | super conserved receptor exprsseed in br | NM_018969 | Sequence number 23 |
| | Phyllodes tumor | PAGE5 | PAGE-5 protein (PAGE-5), mRNA. | NM_130467 | Sequence number 24 |
| Group c | Cancer | FN1 | cellular fibronectin mRNA | NM_002026 | Sequence number 25 |
| | Cancer | TAP1 | transporter 1, ATP-binding cassette sub family B | NM_00059 [symbol] | Sequence number 26 |
| | | | (MDR/TAP) (TAP1), mRNA | | |
| | Cancer | MMP9 | matrix metalloproteinase 9 (gelatinase B, 9 [symbol] kDa | NM_004 [symbol] 94 | Sequence number 27 |
| | | | gelatinase, 92 kDa type IV collagenase) (MMP9), mRNA. | | |
| | Cancer | CTHRC1 | collagen triple helix repeat containing | NM_135455 | Sequence number 28 |

[symbol]

indicates data missing or illegible when filed

TABLE 3B

| Classification | | Symbol | Name | ID | Sequence number |
|---|---|---|---|---|---|
| Group d | Normal | CD36 | CD36 antigen (collagen type 1 receptor, | NM_000072 | Sequence number 29 |
| | Normal | LEP | leptin (obesity homolog, mouse) (LEP), mRNA. | NM_000230 | Sequence number 30 |
| | Normal | LIFR | leukemia inhibitory factor recepter (LIFR), mRNA. | NM_002310 | Sequence number 31 |
| | Normal | PLIN1 | perilipin (PLIN), mRNA. | NM_002 [symbol] | Sequence number 32 |
| | Normal | TGFBR3 | transforming growth factor, beta receptor III (betaglycan, 300 kDa) | NM_003243 | Sequence number 33 |
| | | | (TGFBR3), mRNA. | | |
| | Normal | CAVIN2 | serum deprivation response (phosphatidylserine binding protein) | NM_004657 | Sequence number 34 |
| | | | (SDPR), mRNA. | | |
| | Normal | ADIPOQ | adipocyte. C1Q and collagen domain containing (ACDC), mRNA. | NM_004797 | Sequence number 35 |
| | Normal | GPD1 | glycerol-3-phosphate dehydrogenase 1 (soluble) (GPD1), mRNA. | NM_005276 | Sequence number 36 |
| | Normal | LIPE | lipase, hormone-sensitive (LIPE), mRNA. | NM_005357 | Sequence number 37 |
| | Normal | G0S2 | putative lymphocyte G0/G1 switch gene (G0S2), mRNA | NM_01 [symbol] 714 | Sequence number 38 |
| Group e | Normal-like | KIT | [symbol] HardyZuckerman 4 feline sarcoma viral oncogene homolog | NM_000222 | Sequence number 39 |
| | | | (KIT), mRNA. | | |
| | Normal-like | KRT5 | keratin 5 (epidermolysis bullosa simplex, Dowling Meara/Kobner/ | NM_000424 | Sequence number 40 |
| | | | Weber-Cockayne types) (KRT5), mRNA. | | |
| | Normal-like | KRT14 | keratin 14 (epidermolysis bullosa simplex, Dowling Meara, | NM_000526 | Sequence number 41 |
| | | | Koebner) (KRT14), mRNA. | | |
| | Normal-like | DST | bullous pemphigoid antigen 1, 230/240 kDa (BPAG1), transcript | NM_001723 | Sequence number 42 |
| | | | variant 1 [symbol] , mRNA. | | |
| | Normal-like | KRT15 | keratin 15 (KRT15), mRNA. | NM_00237 [symbol] | Sequence number 43 |
| | Normal-like | PIGR | polymeric immunoglobulin receptor (PIGR), mRNA. | NM_002644 | Sequence number 44 |
| | Normal-like | WIF1 | WNT inhibitory factor 1 (WIF1), mRNA. | NM_007191 | Sequence number 45 |
| | Normal-like | CAPN6 | calpain 6 (CAPN6), mRNA. | NM_014289 | Sequence number 46 |
| | Normal-like | SYNM | desmuslin (DMN), transcript variant A, mRNA. | NM_145728 | Sequence number 47 |
| Group f | TNBC1 | GABRP | gamma-aminobutyric acid (GABA) A receptor, pi (GABRP), | NM_014311 | Sequence number 48 |
| | | | mRNA. | | |
| | TNBC1 | ELF5 | E74-like factor 5 ( [symbol] domain transcription factor) (ELF5), | NM_001432 | Sequence number 49 |
| | | | transcript variant 2, mRNA. | | |
| | TNBC1 | MMP7 | matrix metalloproteinase 7 (matrilysin, uterine) (MMP7), mRNA. | NM_002423 | Sequence number 50 |
| | TNBC1 | SFRP1 | secreted frizzled-related protein 1 (SFRP1), mRNA. | NM_003012 | Sequence number 51 |
| | TNBC1 | MIA | melanoma inhibitory activity (MIA), mRNA. | NM_006533 | Sequence number 52 |
| | TNBC1 | FDCSP | chromosome 4 open reading frame 7 (C4orf7), mRNA. | NM_152997 | Sequence number 53 |

[symbol]

indicates data missing or illegible when filed

TABLE 3C

| Classification | | Symbol | Name | ID | Sequence number |
|---|---|---|---|---|---|
| Group g | TNBC2 | WIPF3 | cDNA FL36931 [symbol] , clone BRACE2005290. | NM_001080529 | Sequence number 54 |
| | TNBC2 | PKP1 | plakophilin 1 (ectodermal dysplasia/skin fragility syndrome) | NM_000299 | Sequence number 55 |
| | | | (PKP1), mRNA. | | |
| | TNBC2 | ART3 | ADP-ribo [symbol] transferase 3 (ART3), mRNA. | NM_001179 | Sequence number 56 |
| | TNBC2 | EN1 | engrailed homolog 1 (EN1), mRNA. | NM_001425 | Sequence number 57 |
| | TNBC2 | FABP5 | fatty acid binding protein 5 (psoriasis-associated) (FABP5), mRNA. | NM_001444 | Sequence number 58 |
| | TNBC2 | FOXC1 | forkhead box C1 (FOXC1), mRNA. | NM_001453 | Sequence number 59 |
| | TNBC2 | DSG3 | desmoglein 3 (pemphigus vulgaris antigen) (DSG3), mRNA. | NM_001944 | Sequence number 60 |
| | TNBC2 | ETV6 | ets variant gene 6 (TEL oncogene) (ETV6), mRNA. | NM_001987 | Sequence number 61 |
| | TNBC2 | ITGB8 | integrin, beta 8 (ITGB8), mRNA. | NM_002214 | Sequence number 62 |
| | TNBC2 | CRABP1 | cellular retinoic acid binding protein 1 (CRABP1). mRNA. | NM_00437 [symbol] | Sequence number 63 |
| | TNBC2 | DSC2 | desmocollin 2 (DSC2), transcript variaat Dsc2b, mRNA. | NM_004 [symbol] 49 | Sequence number 64 |
| | TNBC2 | KLK7 | kallikrein 7 (chym [symbol] ) (KLK7), transcript variant 1, mRNA. | NM_005045 | Sequence number 65 |
| | TNBC2 | MFGE8 | milk fat globule-EGF factor 8 protein (MFGES), mRNA. | NM_00 [symbol] | Sequence number 66 |
| | TNBC2 | MELTF | antigen p97 (melanoma associated) identified by monoclonal | NM_005929 | Sequence number 67 |
| | | | antibodies 1 [symbol] .2 and 96.5 (MFT2), transcript variant 1, mRNA. | | |
| | TNBC2 | PROM1 | prominin 1 (PROM1), mRNA. | NM_006017 | Sequence number 68 |
| | TNBC2 | S100A1 | S100 calcium binding protein A1 (S100A1), mRNA. | NM_006271 | Sequence number 69 |
| | TNBC2 | S100B | S100 calcium binding protein, beta (neural) (S100B), mRNA. | NM_00627 [symbol] | Sequence number 70 |
| | TNBC2 | MARCO | macrophage receptor with collagenous structure (MARCO), mRNA. | NM_006770 | Sequence number 71 |
| | TNBC2 | SCRG1 | [symbol] responsive protein 1 (SCRG1), mRNA. | NM_007281 | Sequence number 72 |
| | TNBC2 | KLK5 | kallikrein 5 (KLK5), mRNA. | NM_032427 | Sequence number 73 |
| | TNBC2 | TM4SF1 | transmembrane 4 superfamily member 1 (TM4SF1), mRNA. | NM_014220 | Sequence number 74 |
| | TNBC2 | RASD2 | RASD family, member 2 (RASD2), mRNA. | NM_014310 | Sequence number 75 |
| | TNBC2 | TFCP2L1 | tanscription factor CP2-like 1 (TFCP2L1), mRNA. | NM_014553 | Sequence number 76 |
| | TNBC2 | KRT23 | keratin 23 (histone deacetylase inducible) (KRT23), transcript | NM_015515 | Sequence number 77 |
| | | | variant 1, mRNA. | | |
| | TNBC2 | VGLL1 | vestigial like 1 (Drosophila) (VGLL1), mRNA. | NM_016267 | Sequence number 78 |
| | TNBC2 | TTYH1 | tweety homolog 1 (Drosophila) (TTYH1), mRNA. | NM_020659 | Sequence number 79 |
| | TNBC2 | SPHK1 | sphingosine kinase 1 (SPHK1), mRNA. | NM_021972 | Sequence number 80 |
| | TNBC2 | OGFRL1 | opioid growth factor receptor-like 1 (OGFRL1), mRNA. | NM_024576 | Sequence number 81 |
| | TNBC2 | HORMAD1 | hypothetical protein DKFZp434A1315 (DKFZP434A1315), mRNA. | NM_032132 | Sequence number 82 |
| | TNBC2 | COL27A1 | collagen, type XXVII, alpha 1 (COL27A1), | NM_032888 | Sequence number 83 |
| | TNBC2 | TRIM47 | tripartite motif-containing 47 (TRIM47), mRNA. | NM_033452 | Sequence number 84 |
| | TNBC2 | TSPYL5 | TSPY-like 5 (TSPYL5), mRNA. | NM_033512 | Sequence number 85 |
| | TNBC2 | CYYR1 | cysteine and tyrosine-rich 1 (CYYR1), mRNA. | NM_0 [symbol] 2954 | Sequence number 86 |
| | TNBC2 | A2ML1 | hypothetical protein FJ25179 (FL25179), mRNA. | NM_144670 | Sequence number 87 |
| | TNBC2 | RFLNA | hypothetical protein LOC144347 (LOC144347), mRNA. | NM_181709 | Sequence number 88 |
| Group h | TNBC3 | RNF150 | cDNA FLJ10151 fis, clone HEMBA1003402. | XM_005263150 | Sequence number 89 |
| | TNBC3 | MZB1 | cDNA FLJ32987 fis, clone THYMU1000032. | NM_016459 | Sequence number 90 |
| | TNBC3 | LYZ | lysozyme (renal amyloidosis) (LYZ), mRNA. | NM_000239 | Sequence number 91 |
| | TNBC3 | SPIB | Spi-B transcription factor (Spi- [symbol] /PU.1 related) (SPIB), mRNA. | NM_003121 | Sequence number 92 |
| | TNBC3 | KCNK5 | potassium channel, subfamily K, member 5 (KCNK5), mRNA. | NM_003740 | Sequence number 93 |
| | TNBC3 | BCL2A1 | BCL2-related protein A1 (BCL2A1), mRNA. | NM_004049 | Sequence number 94 |
| | TNBC3 | LMO4 | LIM domain only 4 (LMO4), mRNA. | NM_006769 | Sequence number 95 |

[symbol]

indicates data missing or illegible when filed

TABLE 3D

| Classification | | Symbol | Name | ID | Sequence number |
|---|---|---|---|---|---|
| Group i | HER2⁺-like | GLYATL2 | BXMAS2-10 (BXMAS2-10), mRNA. | NM_145016 | Sequence number 96 |
| | HER2⁺-like | GGT1 | gamma-glutamyltransferase 1 (GGT3), transcript variant 1, mRNA. | NM_013421 | Sequence number 97 |
| | HER2⁺-like | NXPH4 | cDNA FLJ3691 [symbol] fis, clone BRACE2003847, highly similar to Rattus | NM_007224 | Sequence number 98 |
| | | | norvegicus neurexophilin 4 (Nph4) mRNA. | | |
| | HER2⁺-like | ATP13A5 | cDNA FLJ16025 fis, clone CTONG2004062, highly similar to ATPase | NM_198505 | Sequence number 99 |
| | | | subunit 5. | | |
| | HER2⁺-like | PLA2G2A | phospholipase A2, group IIA (platelets, synovial fluid) (PLA2G2A), | NM_000300 | Sequence number 100 |
| | | | mRNA. | | |
| | HER2⁺-like | HPGD | hydroxyprostaglandin dehydrogenase 15 (NAD) (HPGD), mRNA. | NM_000860 | Sequence number 101 |
| | HER2⁺-like | FABP7 | fatty acid binding protein 7, brain (FABP7), mRNA. | NM_001446 | Sequence number 102 |
| | HER2⁺-like | MPP3 | membrane protein palmitoylated 3 (MAGUK p55 subfamily member | NM_001932 | Sequence number 103 |
| | | | 3) (MPP3), mRNA. | | |
| | HER2⁺-like | HSD17B2 | hydroxysteroid (17-beta) dehydrogenase 2 (HSD17B2), mRNA. | NM_002153 | Sequence number 104 |
| | HER2⁺-like | S100A9 | S100 calcium bindng protein A9 (calgranulin B) (S100A9), mRNA. | NM_002965 | Sequence number 105 |
| | HER2⁺-like | SLPI | secretory leukocyte protease inhibitor (antileukoproteinase) (SLPI), | NM_003064 | Sequence number 106 |
| | | | mRNA. | | |
| | HER2⁺-like | TFAP2B | transcription factor AP-2 beta (activating enhancer binding protein | NM_003221 | Sequence number 107 |
| | | | 2 beta) (TFAP2B), mRNA. | | |
| | HER2⁺-like | THRSP | thyroid hormone responsive (SPOT14 homolog, rat) (THRSP), | NM_00 [symbol] 251 | Sequence number 108 |
| | | | mRNA. | | |
| | HER2⁺-like | WNT5A | wingless-type MMTV integration site family, member 5A (WNT5A), | NM_003392 | Sequence number 109 |
| | | | mRNA. | | |
| | HER2⁺-like | KMO | kynurenine 3-monooxygenase (kynurexine 3-hydroxylase) (KMO), | NM_003292 | Sequence number 110 |
| | | | mRNA. | | |
| | HER2⁺-like | KYNU | kynureninase (L-kynurenine hydrolase) (KYNU), mRNA. | NM_003679 | Sequence number 111 |
| | HER2⁺-like | FASN | fatty acid synthase (FASN), mRNA. | NM_003937 | Sequence number 112 |
| | HER2⁺-like | LBP | lipopolysaccaride binding protein (LBP), mRNA. | NM_004104 | Sequence number 113 |
| | HER2⁺-like | PAPSS2 | 3′-pohsophoadenosine 5′-phosphosulfate synthase 2 (PAPSS2), mRNA. | NM_004 [symbol] 9 | Sequence number 114 |
| | HER2⁺-like | ENPP3 | ectonucleotide pyrophosphatase/phosphodiesterase 3 (ENPP3), mRNA. | NM_004670 | Sequence number 115 |
| | HER2⁺-like | MPHOSPH6 | M-phase phosphoprotein 6 (MPHOSPH6), mRNA. | NM_005021 | Sequence number 116 |
| | HER2⁺-like | CLCA2 | chloride channel, calcium activated, family member 2 (CLCA2), | NM_005702 | Sequence number 117 |
| | | | mRNA. | | |
| | HER2⁺-like | PXMP4 | peroxisomal membrane protein 4, 24 kDa (PXMP4), transcript variant | NM_00 [symbol] 836 | Sequence number 118 |
| | | | 1, mRNA. | | |
| | HER2⁺-like | SRPK3 | serine/threonine kinase 23 (STK23), mRNA. | NM_014370 | Sequence number 119 |
| | HER2⁺-like | SERHL2 | kraken-like (dJ222E13.1), mRNA. | NM_014509 | Sequence number 120 |
| | HER2⁺-like | VPS13D | vacuolar protein sorting 13D (yeast) (VP | NM_015378 | Sequence number 121 |
| | HER2⁺-like | ABCA12 | ATP-binding cassette, sub-family A (ABC1), member 12 (ABCA12), | NM_015657 | Sequence number 122 |
| | | | transcript variant 2, mRNA. | | |
| | HER2⁺-like | TRPV6 | transient receptor potential cation chan | NM_018646 | Sequence number 123 |
| | HER2⁺-like | SRD5A3 | hypothetical protein FLJ13352 (FLJ13352), mRNA. | NM_024592 | Sequence number 124 |
| | HER2⁺-like | MAB21L4 | hypothetical protein FLJ22671 (FLJ22671), mRNA. | NM_024861 | Sequence number 125 |
| | HER2⁺-like | C21orf58 | chromosome 21 open reading frame 58 (C21orf58), transcript variant | NM_058180 | Sequence number 126 |
| | | | 1, mRNA. | | |
| | HER2⁺-like | TMEM45B | hypothetical protein BC016153 (LOC120224), mRNA. | NM_138788 | Sequence number 127 |
| | HER2⁺-like | NUDT8 | nudix (nucleotide diphosphate linked moiety X)-type [symbol] 8 (NUDT8), | NM_181843 | Sequence number 128 |
| | | | mRNA. | | |
| | HER2⁺-like | CLDN8 | claudin 8 (CLDN8), mRNA. | NM_199328 | Sequence number 129 |
| | HER2⁺-like | KRT7 | keratin 7 (KRT7), mRNA. | NM_005556 | Sequence number 130 |
| | HER2⁺-like | TMEM86A | hypothetical protein FLJ90119 (FLJ90119), mRNA. | NM_153347 | Sequence number 131 |
| | HER2⁺-like | MBOAT1 | cDNA FLJ16207 fis, clone CTONG201 [symbol] 822 | NM_001080480 | Sequence number 132 |

[symbol]

indicates data missing or illegible when filed

TABLE 3E

| Classification | | Symbol | Name | ID | Sequence number |
|---|---|---|---|---|---|
| Group j | HER2 amplification-1 | PGAP3 | per1-like domain containing 1 (PERLD1), mRNA. | NM_03341 [symbol] | Sequence number 133 |
| | HER2 amplification-1 | STARD3 | START domain containing 3 (STARD3), mRNA. | NM_006 [symbol] 04 | Sequence number 134 |
| | HER2 amplification-1 | ERBB2 | [symbol] -b2 erythroblastic leukemia viral oncogene homolog 2, | NM_004440 | Sequence number 135 |
| | | | neuro/glioblastoma derived oncogene homolog (avian) | | |
| | | | (ERBB2), mRNA. | | |
| | HER2 amplification-1 | MIEN1 | chromosome 17 open reading frame 37 (C17orf37), mRNA. | NM_032330 | Sequence number 136 |
| | HER2 amplification-1 | GRB7 | growth factor receptor bound protein 7 (GRB7), mRNA. | NM_005310 | Sequence number 137 |
| Group k | HER2 amplification-2 | GSDMB | gasdermin-like (GSDML), mRNA. | NM_018530 | Sequence number 138 |
| | HER2 amplification-2 | ORMDL3 | ORM1-like 3 (S. cervi) (ORMDL3), mRNA. | NM_139280 | Sequence number 139 |
| | HER2 amplification-2 | MED24 | thyroid hormone receptor associated protein 4 (THRAP4), | NM_014815 | Sequence number 140 |
| | | | mRNA. | | |
| | HER2 amplification-2 | MSL1 | cDNA PLJ [symbol] 0S16 [symbol] , clone PEBRA2001 [symbol] 1. | NM_001012241 | Sequence number 141 |
| | HER2 amplification-2 | CASC3 | cancer susceptibility candidate 3 (CASC3), mRNA. | NM_007359 | Sequence number 142 |
| | HER2 amplification-2 | WIPF2 | WIRE protein (WIRE), mRNA. | NM_133264 | Sequence number 143 |

[symbol]

indicates data missing or illegible when filed

TABLE 3F

| Classification | | Sywhol | Name | ID | Sequence number |
|---|---|---|---|---|---|
| Group l | Hormone sensitivity | GFRA1 | GDNF family receptor alpha X (GFRA1), transcript variant 1, | NM_005254 | Sequence number 144 |
| | | | mRNA. | | |
| | Hormone sensitivity | MAPT | microtubule-associated protein tau (MAPT), transcript | NM_016835 | Sequence number 145 |
| | | | variant 1, mRNA. | | |
| | Hormone sensitivity | EVL | Enah/Vasp-like (EVL), mRNA. | NM_016337 | Sequence number 146 |
| | Hormone sensitivity | CA12 | carbonic anhydrase XII (CA12), transcrip | NM_20692 [symbol] | Sequence number 147 |
| | Hormone sensitivity | LONRF2 | cDNA FLJ31 [symbol] 11 fis, clone NT2R [symbol] 009402. | NM_198461 | Sequence number 148 |
| | Hormone sensitivity | CYP2B6 | cytochrome P450-IIB ( [symbol] ) mRNA. complete [symbol] . | NM_000767 | Sequence number 149 |
| | Hormone sensitivity | PARD6B | par-6 partitioning defective 6 homolog b | NM_032521 | Sequence number 150 |
| | Hormone sensitivity | TBC1D9 | KIAAOS82 protein (KIAAOS82), mRNA. | NM_015130 | Sequence number 151 |
| | Hormone sensitivity | ESR1 | estrogen receptor 1 (ESR1), mRNA. | NM_000135 | Sequence number 152 |
| | Hormone sensitivity | NAT1 | N-acetyiltransferase 1 (arylamine N-acetyltransferase) (NAT1), | NM_000562 | Sequence number 153 |
| | | | mRNA. | | |
| | Hormone sensitivity | CHAD | chondroadherin (CHAD), mRNA. | NM_001357 | Sequence number 154 |
| | Hormone sensitivity | HPN | hapsin (transmembrane protease, serine 1) (HPN) transcript | NM_002151 | Sequence number 155 |
| | | | variant 2, mRNA. | | |
| | Hormone sensitivity | IL6ST | interleukin 6 signal transducer ( [symbol] , oncostatin M receptor) | NM_003184 | Sequence number 156 |
| | | | (IL6ST), transcript variant 1, mRNA. | | |
| | Hormone sensitivity | STC2 | stanniocalcin 2 (STC2), mRNA. | NM_00 [symbol] 718 | Sequence number 157 |
| | Hormone sensitivity | SLC39A6 | solute carrier family 39 (zinc transporter), member 6 | NM_013319 | Sequence number 158 |
| | | | (SLC39A6), mRNA. | | |
| | Hormone sensitivity | GREB1 | GREB1 protoin (GREB1), teascript variant a, mRNA. | NM_014668 | Sequence number 159 |
| | Hormone sensitivity | GASK1B | hypothetical protein DKFZp434L14 [symbol] (DKFZp434L14 [symbol] ), | NM_016613 | Sequence number 160 |
| | | | mRNA. | | |
| | Hormone sensitivity | DBNDD2 | chromosome 20 open reading frame 35 (C20orf35), mRNA. | NM_018478 | Sequence number 161 |
| | Hormone sensitivity | ENPP5 | ectonucleotide pyrophosphatase/phosphodiesterase 5 (purative | NM_021572 | Sequence number 162 |
| | | | function) (ENPP5), mRNA. | | |
| | Hormone sensitivity | THSD4 | hypothetical protein FLJ13710 (FLJ13710), mRNA. | NM_024817 | Soquence number 163 |
| | Hormone sensitivity | ZNF703 | hypothetical protein FLJ14299 (FLJ14299), mRNA. | NM_025069 | Sequence number 164 |
| | Hormone sensitivity | TCEAL3 | hypothetical protein MGC15737 (MGC15737), mRNA. | NM_032926 | Sequence number 165 |
| | Hormone sensitivity | FGD3 | FGD1 family, member 3 (FGD3), mRNA. | NM_033085 | Sequence number 166 |
| | Hormone sensitivity | KCNE4 | potassium voltage-gated channel, Isk-related family, member 4 | NM_080671 | Sequence number 167 |
| | | | (KCNE4), mRNA. | | |
| | Hormone sensitivity | ARMT1 | chromosome 6 open reading frame [symbol] (C6orf2 [symbol] ), mRNA. | NM_024 [symbol] 73 | Sequence number 168 |
| | Hormone sensitivity | MAGED2 | melanoma antigen, family D, 2 (MAGED3), transcript variant | NM_177433 | Sequence number 169 |
| | | | 2, mRNA. | | |
| | Hormone sensitivity | CELSR1 | cadherin, EGF LAG seven-pass G-type receptor 1 (flamingo | NM_014245 | Sequence number 170 |
| | | | homolog, Drosophila) (CELER3), mRNA. | | |
| | Hormone sensitivity | INPP5J | phosphatidylinositol (4,5) bisphosphate 5-phosphatase, A | NM_001002837 | Sequence number 171 |
| | | | (PIB5PA), mRNA. | | |
| | Hormone sensitivity | PADI2 | peytidyl arginine deiminase, type II (PADI2), mRNA. | NM_007 [symbol] | Sequence number 172 |
| | Hormone sensitivity | PPP1R1B | protein phosphatase 1, regulatory (inhibitor) subunit 1B | NM_032192 | Sequence number 173 |
| | | | (dopamine and cAMP regulated phosphoprotein, DARPP-32) | | |
| | | | (PPP1R1B), mRNA. | | |

[symbol]

indicates data missing or illegible when filed

TABLE 3G

| Classification | | Symbol | Name | ID | Sequence number |
|---|---|---|---|---|---|
| Group n | Differentiated | GATA3 | GATA bindng protein 3 (GATA3), mRNA. | NM_002051 | Sequence number 174 |
| | Differentiated | SCGB2A2 | secretoglobin family 2A, member 2 (SCGB2A2), mRNA. | NM_002411 | Sequence number 175 |
| | Differentiated | TFF3 | trefoil factor 3 (intestinal) (TFF3), mRNA. | NM_003226 | Sequence number 176 |
| | Differentiated | FOXA1 | forkhead box A1 (FOXA1), mRNA. | NM_004496 | Sequence number 177 |
| | Differentiated | XBP1 | X-box binding protein 1 (XBP1), mRNA. | NM_005080 | Sequence number 178 |
| | Differentiated | AGR2 | anterior gradient 2 homolog (Xenopus laevis) (AGR2), mRNA. | NM_006408 | Sequence number 179 |
| | Differentiated | KIAA0040 | KIAA0040 gene product (KIAA0040), mRNA. | NM_014 [symbol] | Sequence number 180 |
| | Differentiated | MLPH | melanophilin (MLPN), mRNA | NM_024101 | Sequence number 181 |
| | Differentiated | MUCL1 | small breast epithelial mucin (LOC118430), mRNA. | NM_0 [symbol] 173 | Sequence number 182 |
| | Differentiated | TMC4 | transmembrane channel-like 4 (TMC4), mRNA. | NM_1446 [symbol] | Sequence number 183 |
| | Differentiated | ZG16B | similar to common salivary protein 1 (LOC124220), mRNA. | NM_14 [symbol] | Sequence number 184 |
| Group o | Cell cycle | RRM2 | ribonucleotide reductase M2 polypeptide (RRM2), mRNA. | NM_001034 | Sequence number 185 |
| | Cell cycle | CCNA2 | cyclin A2 (CCNA2), mRNA. | NM_001237 | Sequence number 186 |
| | Cell cycle | CDC20 | CDC20 cell division cycle 20 homolog (S. cerevisiae) (CDC20), mRNA. | NM_001255 | Sequence number 187 |
| | Cell cycle | CDK1 | cell division cycle 2, G1 to S and G2 to M (CDC2), manuscript variant | NM_001786 | Sequence number 188 |
| | | | 1, mRNA. | | |
| | Cell cycle | CKS2 | CDC28 protein kinase regulatory subunit 2 (CKS2), mRNA. | NM_001827 | Sequence number 189 |
| | Cell cycle | H2AFX | H2A histone family, member X (H2AFX), mRNA | NM_002105 | Sequence number 190 |
| | Cell cycle | H2AFZ | H2A histone family, member 2 (H2AFZ), mRNA. | NM_002106 | Sequence number 191 |
| | Cell cycle | KPNA2 | karyopherin alpha 2 (RAG cohort 1, importin alpha 1) (KPNA2), mRNA. | NM_00226 [symbol] | Sequence number 192 |
| | Cell cycle | MKI67 | antigen identified by monoclonal anxibody Ki-67 (MKI63), mRNA. | NM_002417 | Sequence number 193 |
| | Cell cycle | MYBL2 | v-myb [symbol] viral oncogene homolog (avian)-like 2 (MYBL2), mRNA. | NM_00246 [symbol] | Sequence number 194 |
| | Cell cycle | GGH | gamma-glutamyl hydrolase (cojugase, folylpolygammaglutamyl | NM_00387 [symbol] | Sequence number 195 |
| | | | hydrolase) (GGH), mRNA. | | |
| | Cell cycle | PTTG1 | pituitary tumor-transforming 1 (PTTG1), mRNA. | NM_004219 | Sequence number 196 |
| | Cell cycle | DDX11 | DEAD/H (Asp-Glu-Ala-Asp-His) box polypeptide 11 (CHL1- | NM_004399 | Sequence number 197 |
| | | | like helicase homolog, S. cerevisiae) (DDX11), transcript variant 2, | | |
| | | | mRNA. | | |
| | Cell cycle | CCNB2 | cyclin B2 (CCNB2), mRNA. | NM_004701 | Sequence number 198 |
| | Cell cycle | UBE2C | ubiquitin-conjugating enzyme E2C (UBE2C), transcript variant 1, | NM_007019 | Sequence number 199 |
| | | | mRNA. | | |
| | Cell cycle | ATAD2 | ATPase family, AAA domain containing 2 (ATAD2), mRNA. | NM_014109 | Sequence number 200 |
| | Cell cycle | UBE2T | HSPC150 protein similar to ubiquitin-conjugating enzyme (HSPC150), | NM_01417 [symbol] | Sequence number 201 |
| | | | mRNA. | | |
| | Cell cycle | JPT1 | hematological and neurological expressed 1 (HN1), mRNA. | NM_016185 | Sequence number 202 |
| | Cell cycle | CKAP2 | cytoskeleton associated protein 3 (CKAP2), mRNA. | NM_018204 | Sequence number 203 |
| | Cell cycle | ANLN | anilain, actin binding protein (scraps homolog, Drosopeils) (ANLN), | NM_018685 | Sequence number 204 |
| | | | mRNA. | | |
| | Cell cycle | FOXM1 | forkhead box M1 (FOXM1), transcript variant 2, mRNA. | NM_021953 | Sequence number 205 |
| | Cell cycle | CDCA3 | cel division cycle associated 3 (CDCA3), mRNA. | NM_031299 | Sequence number 206 |
| | Cell cycle | MCM4 | MCM4 minichromosome maintenance deficient 4 (S. cerevisiae) | NM_18274 [symbol] | Sequence number 207 |
| | | | (MCM4), transcript variant 2, mRNA. | | |

[symbol]

indicates data missing or illegible when filed

[0140] The “subtype differentiation score” is a score capable of differentiating or classifying a subtype of breast cancer. One or a plurality of “subtype differentiation scores” can be used when differentiating or classifying a subtype of breast cancer. Examples of “subtype differentiation scores” include a cancer score, a cell cycle score, a squamous cell score, a phyllodes tumor score, a normal-like score, a triple negative score, a HER2-like score, a HER2 amplification score, and a hormone sensitivity score.

[0141] Each “subtype differentiation score” can be determined by measuring the expression levels of genes included in the groups a to o. Here, the gene groups required to determine each “subtype differentiation score” are shown in Table 4 below.

TABLE 4

| Subtype differentiation score | Gene groups required for score calculation |
|---|---|
| Cancer score | Group c and group d |
| Cell cycle score | Group o |
| Squamous cell score | Group a |
| Phyllodes tumor score | Group b |
| Normal-like score | Group e |
| Triple negative score | Group f, group g, group h, and group n |
| HER2-like score | Group i |
| HER2 amplification score | Group j and group k |
| Hormone sensitivity score | Group l and group m |

[0142] The gene for which the expression level is measured to calculate the “subtype differentiation score” need only be a gene belonging to the gene group corresponding to each subtype differentiation score shown in the above-described table. The gene for which the expression level is measured need only be at least one gene included in each gene group, and is preferably two or more, three or more, four or more, five or more, six or more, seven or more, eight or more, nine or more, ten or more, 15 or more, or 20 or more. Even if the number of genes for which the expression levels are measured is one gene included in each gene group, the subtype differentiation score can be calculated and ultimately used to differentiate or classify the subtype of the test sample. In a case in which the number of genes for which the expression level is measured is one gene as described above, the task is simplified and the cost can be suppressed, which is preferable. On the other hand, as the number of genes for which the expression levels are measured increases, the accuracy of subtype differentiation or classification improves, which is preferable. In one preferred embodiment of the present invention, the genes for which expression levels are measured are all genes included in each gene group.

[0143] It should be noted that, in some cases, the differentiation marker gene set of the present invention does not include one or a plurality of specific genes in the above-described “differentiating gene group.” In one embodiment, the differentiation marker gene set of the present invention does not include a specific gene used for differentiating or classifying a specific subtype (specific gene included in the gene group composed of the groups a to o). Here, “a specific gene used for differentiating or classifying a specific subtype” not being included means that the differentiation marker gene set does not include the specific gene in an aspect used for differentiating or classifying the specific subtype, but does not exclude that the specific gene is included in an aspect used for differentiating or classifying other subtypes. Further, in another embodiment, the differentiation marker gene set of the present invention does not include a specific gene (specific gene included in the gene group composed of the groups a to o).

[0144] The “subtype differentiation score” required for differentiating or classifying a breast cancer subtype differs depending on the desired subtype to be differentiated or classified, and one or a combination of a plurality of the subtype differentiation scores listed above may be used. Specifically, by using one or a combination of a plurality of subtype differentiation scores in Table 5 below for each breast cancer subtype, it is possible to differentiate or classify whether the test sample is the desired subtype.

TABLE 5

| | Subtype differentiation scores required |
|---|---|
| Breast cancer subtype | for differentiation of subtype |
| Luminal A | Hormone sensitivity score, cell cycle |
| | score, and HER2 amplification score |
| Luminal B (HER2 positive) | HER2 amplification score and hormone |
| | sensitivity score |
| Luminal B (HER2 negative) | Hormone sensitivity score, cell cycle |
| | score, and HER2 amplification score |
| HER2 positive | Hormone sensitivity score, HER2 |
| | amplification score, and HER2-like score |
| HER2 positive-like | HER2-like score and HER2 amplification |
| | score |
| Triple negative | Triple negative score |
| Phyllodes tumor | Phyllodes tumor score |
| Squamous cell carcinoma | Squamous cell score |
| Undeterminable | Cancer score and all other scores |
| Normal-like | Normal-like score and cancer score |
| Normal | Cancer score |

[0145] The differentiation marker gene set for differentiating or classifying a subtype of breast cancer, which is the first aspect of the present invention, includes a combination of genes obtained by selecting at least one gene from each gene group of at least one gene group selected from gene groups composed of the groups a to o. Here, at least one gene group selected from the gene group composed of the groups a to o is selected as appropriate in accordance with the desired subtype to be differentiated or classified.

[0146] As the “desired subtype to be differentiated or classified,” one of the subtypes of breast cancer may be selected, or a plurality of the subtypes may be selected. When a plurality of the subtypes are selected as the “desired subtype to be differentiated or classified,” there is no limit to the combination of subtypes, and all combinations of subtypes selected from the group composed of luminal A, luminal B (HER2 positive), luminal B (HER2 negative), HER2 positive, HER2 positive-like, triple negative, phyllodes tumor, squamous cell carcinoma, normal-like, normal, and undeterminable are included. Although not limited to the following examples, in one embodiment, for example, the combination of subtypes is the four subtypes of the luminal A and B group, the HER2+-like group, the HER2+ group, and the triple negative group and, at this time, the differentiation marker gene set is a combination of genes obtained by selecting at least one gene from each gene group of the group f, the group g, the group i, the group j, the group k, the group 1, the group m, the group n, and the group o. In such an embodiment, the sample to be differentiated or classified is a subtype of any of the luminal A and B group, the HER2+-like group, the HER2+group, and the triple negative group, or the sample can be differentiated or classified as another subtype. Further, in yet another embodiment, all subtypes (11 subtypes) can be targeted as the “desired subtype to be differentiated or classified.” At this time, the differentiation marker gene set is a combination of genes obtained by selecting at least one gene from each gene group of the groups a to o.

[0147] With selection of the “desired subtype to be differentiated or classified,” the subtype differentiation score required to differentiate the subtype is determined with reference to the above-described Table 5, and the gene groups required to calculate the subtype differentiation score are selected from the groups a to o with reference to the above-described Table 4. The differentiation marker gene includes at least one gene belonging to each of the gene groups thus selected.

[0148] For example, in a case in which the “desired subtype to be differentiated or classified” is luminal A, the subtype differentiation scores are the hormone sensitivity score, the cell cycle score, and the HER2 amplification score. Accordingly, the gene groups required to calculate the subtype differentiation scores are the group 1 and the group m required to calculate the hormone sensitivity score, the group o required to calculate the cell cycle score, and the group j and the group k required to calculate the HER2 amplification score. As a result, at least one gene can be selected from each group of the group j, the group k, the group 1, the group m, and the group o and used as a differentiation marker gene.

[0149] The differentiation marker gene set according to the present invention, in one embodiment, includes a combination of genes obtained by selecting at least one gene from each gene group of 15 gene groups composed of the groups a to o. According to this embodiment, by measuring the expressions of the genes included in the differentiation marker gene set, it is possible to differentiate or classify a plurality of subtypes at one time.

[0150] In addition, the differentiation marker gene set according to the present invention, in one embodiment, can further include at least one gene selected from a control group composed of ABCF3, FBXW5, MLLT1, FAM234A, PITPNM1, WDR1, NDUFS7, and AP2A1. The genes included in this control group are genes newly discovered as genes for which significant variation in expression does not occur in any of the breast cancer subtypes, and can be suitably used as controls.

### 2. Method of Differentiating Subtype of Breast Cancer

### 2-1. Overview

[0151] Another aspect of the present invention is a method of differentiating or classifying a subtype of breast cancer in a test sample. It should be noted that the method of differentiating or classifying according to the present invention can be used in combination with a histopathological examination or the like and therefore, in one embodiment, can be called a method of assisting differentiation or classification.

[0152] The method of differentiating or classifying according to the present invention is a method of measuring the expression level of a differentiation marker included in a sample collected from a subject, and differentiating or classifying the subtype of breast cancer in the subject on the basis of an expression profile of the differentiation marker. The “expression profile of the differentiation marker” means information related to the expression level of each gene constituting the differentiation marker. In this specification, this expression profile particularly includes information related to the expression levels of a plurality of differentiating genes. In general, the larger the expression profile of the genes to be acquired, the more accurate the differentiation can become.

### 2-2. Measurement Method

[0153] The method of differentiating or classifying according to the present invention includes, as an essential step, a step of measuring the expression level of at least one gene included in the differentiating gene group. More specifically, the method of differentiating or classifying according to the present invention includes (a) a step of measuring, in a test sample, expression levels of genes included in the gene set for differentiating or classifying a subtype of breast cancer. Hereinafter, the measurement method will be specifically described.

[0154] The “measurement step” is a step of measuring the expression level of the differentiation marker in the test sample and obtaining the measured value. For the measurement of the expression of the differentiation marker, measuring the expression level per unit amount of each differentiation marker is preferred.

[0155] In this specification, the “test sample” is a sample collected from a subject and includes breast cancer tissue or tissue suspected to be breast cancer tissue or a portion thereof. Further, in this specification, the term “subject” refers to a human individual who provides a sample and is subjected to an examination. The subject may be either an individual having a history of breast cancer or an individual suspected of having breast cancer. The “individual having a history of breast cancer” referred to herein includes a patient currently suffering from breast cancer and a person having a history of breast cancer who has previously suffered from breast cancer. The subject in the method according to the present invention is preferably a subject having a history of breast cancer of a subtype that is difficult to differentiate or classify by a conventional histopathological examination.

[0156] In this specification, the “breast cancer patient having a desired subtype to be differentiated or classified” means a patient suffering from breast cancer belonging to a specific subtype to be differentiated or classified (for example, a patient suffering from luminal A-type breast cancer, a patient suffering from luminal B- (HER2 positive)-type breast cancer, or the like). In particular, for comparison with the test sample, the term may refer to the source that provides the sample, and samples derived from breast cancer belonging to specific subtypes can be obtained from patient suffering from breast cancer of these specific subtypes. The specific subtype to be differentiated or classified is not limited to one subtype, but may be a combination of two or more subtypes.

[0157] The “subjects” and “patients suffering from breast cancer of each subtype” used in this aspect are not particularly limited in terms of physical conditions such as gender, age, height, and weight, and the number of individuals is not particularly limited, but the “patients suffering from breast cancer of each subtype” to be compared preferably have the same physical conditions as or similar physical conditions to the subjects, such as age, height, and weight. It should be noted that, in this specification, a group composed of a plurality of “patients suffering from breast cancer of a specific subtype” is referred to as “a group of patients suffering from breast cancer of a specific subtype” (for example, a group composed of a plurality of patients suffering from luminal A-type breast cancer is referred to as “a group of patients suffering from luminal A-type breast cancer”).

[0158] In this specification, the “sample” is a sample collected from the subject and used in the differentiation method of this aspect, and corresponds to, for example, a tissue, a cell, a body fluid, or a peritoneal washing. The “tissue” and “cell” referred to herein may be derived from any area of the subject, but are preferably specimens, more specifically, breast tissue or breast cells, collected by biopsy or excised by surgery. Breast cancer cells collected by biopsy, or breast cancer tissue or breast cancer cells suspected of having breast cancer, are particularly preferred. It should be noted that these tissues or cells may be formalin-fixed paraffin embedded (FFPE). Further, the term “body fluid” referred to herein means a liquid biological sample collected from a subject. Examples thereof include blood (including serum, plasma, and interstitial fluid), spinal fluid (cerebrospinal fluid), urine, lymph, digestive fluid, ascites, pleural fluid, perineural fluid, and extracts of tissues or cells. The preferred body fluid is blood.

[0159] Sample collection, for tissues or cells, may be carried out by biopsy or surgical removal. Further, for a body fluid, collection may be carried out on the basis of a method known in the field. For example, for blood or lymph, a known blood collection method need only be followed. The amount of the sample required for the differentiation or classification method of this aspect is not particularly limited. For tissues or cells, at least 10 μg, preferably at least 0.1 mg, is desirable. Further, the sample may be biopsy material. For body fluid such as blood or lymph, a volume of at least 0.1 mL, preferably at least 1 mL, and more preferably at least 10 mL, is sufficient. The sample can be prepared and treated as necessary so that the differentiation marker can be measured. If the sample is tissues or cells, examples include homogenizing treatment, cytolysis treatment, impurity removal by centrifugation or filtration, and addition of a protease inhibitor. Details of these treatments are described in Green & Sambrook, Molecular Cloning, 2012, Fourth Ed., Cold Spring Harbor Laboratory Press, which can be used as reference.

[0160] In this specification, the term “unit amount” refers to an arbitrarily determined amount of the sample. For example, volume (represented by μL or mL) and weight (represented by μg, mg, or g) are applicable. Although the unit amount is not particularly specified, it is preferable that the unit amount to be measured by the differentiation method in a series is constant. In this step, differentiation with higher accuracy is possible by keeping the unit amount of the sample derived from the subject to be used for measurement and the sample derived from the breast cancer patient of each subtype to be compared constant. In particular, when the expression level of the differentiation marker is to be measured as an absolute value, it is necessary to keep the unit amount constant.

[0161] Hereinafter, the measurement method of a transcription product of a gene will be specifically described. It should be noted that measurement methods of a transcription product of a gene are known. Hereinafter, description related to the measurement method of a transcription product or a translation product of a gene set forth in Japanese Laid-Open Patent Application No. 2016-13081 will be referenced or cited. It should be noted that, in the following, typical measurement methods of a transcription product or a translation product of a gene will be described, but the present invention is not limited to these methods, and a known measurement method can be used.

[0162] The measurement of a transcription product of a differentiating gene may be measurement of mRNA amounts or measurement of cDNA amounts obtained by reverse transcription of mRNA. In general, for measurement of a transcription product of a gene, a method of measuring the expression level of the gene as an absolute value or a relative value by using a nucleotide including all or a portion of the nucleotide sequence of the above-described gene as a primer or a probe is adopted.

[0163] The primer or the probe of this aspect is usually constituted by natural nucleic acids such as DNA and RNA. DNA is particularly preferable because of high stability and the ease of synthesis at an inexpensive cost. Further, natural nucleic acids can be combined with chemically-modified nucleic acids or pseudo-nucleic acids as necessary. Examples of chemically-modified nucleic acids and pseudo-nucleic acids include peptide nucleic acid (PNA), locked nucleic acid (LNA; registered trademark), methyl phosphonate DNA, phosphorothioate DNA, and 2′-O-methyl RNA. Further, the primers and the probes may be labeled or modified with fluorescent substances and/or quencher substances, or labeling substances such as radioactive isotopes (for example, 32P, 33P, or 35S), or a modifying substance such as biotin or (strept) avidin, or magnetic beads. The labeling substance is not limited, and commercially available products can be used. For example, as a fluorescent substance, FITC, Texas, Cy3, Cy5, Cy7, Cyanine3, Cyanine5, Cyanine7, FAM, HEX, VIC, fluorescamine and derivatives thereof, rhodamine and derivatives thereof, and the like can be used. As a quencher substance, AMRA, DABCYL, BHQ-1, BHQ-2, BHQ-3, and the like can be used. A position for labeling a primer or a probe with a labeling substance can be determined, as appropriate, depending on the properties or intended use of the modifying substance. In general, the 5′ or 3′ end is often modified. Further, a single primer or probe molecule may be labeled with one or more labeling substances. A nucleotide can be labeled with these substances by a known method.

[0164] A nucleotide used as a primer or probe may be any nucleotide composed of a sense strand or an antisense strand of each gene constituting the above-described differentiation marker.

[0165] A base length of a primer or a probe is not particularly limited. In the case of a probe, if used in a hybridization method described later, the base length thereof is from at least a 10-base length to the full-length of the gene, preferably from a 15-base length to the full-length of the gene, more preferably from a 30-base length to the full-length of the gene, and even more preferably from a 50-base length to the full-length of the gene. In the case of microarray use, the base length thereof is a 10- to 200-base length, preferably a 20- to 150-base length, and more preferably a 30- to 100-base length. In general, a longer probe results in higher hybridization efficiency and higher sensitivity. On the other hand, a shorter probe results in lower sensitivity, but conversely also results in higher specificity. On the other hand, in the case of a primer, each of a forward primer and a reverse primer may have a length of 10 to 50 bp, preferably 15 to 30 bp.

[0166] Preparation of the primer or the probe described above is known to those skilled in the art and can be performed, for example, according to the method described in Green & Sambrook, Molecular Cloning (2012) mentioned above. Further, it is also possible to provide a contracted manufacturer for nucleic acid synthesis with sequence information and entrust the manufacturer with manufacturing.

[0167] Measurement of the transcription product of the differentiating gene may be performed by a known nucleic acid detection and quantification method, and the method is not particularly limited. Examples include a hybridization method, a nucleic acid amplification method, or an RNA sequencing (RNA-Seq) analysis method.

[0168] The “hybridization method” is a method of detecting and quantifying a target nucleic acid or a fragment thereof by using, as a probe, a nucleic acid fragment having a nucleotide sequence complementary to all or a portion of the nucleotide sequence of a target nucleic acid to be detected, and by utilizing base pairing between the nucleic acid and the probe. In this aspect, the target nucleic acids correspond to mRNAs or cDNAs of each gene constituting the differentiation markers or a fragment thereof. In general, the hybridization method is preferably performed under stringent conditions to eliminate non-target nucleic acids nonspecifically hybridized. The highly stringent conditions mentioned above at a low salt concentration and a high temperature are more preferable. As the hybridization method, several methods involving different detection means are known and, for example, a Northern blot method (Northern hybridization method), a microarray method, a surface plasmon resonance method, or a quartz crystal microbalance method is preferable.

[0169] The “Northern blot method” is one method of analyzing gene expression, and is a method in which total RNA or mRNA prepared from a sample is separated by electrophoresis through agarose gel, polyacrylamide gel, or the like under denatured conditions and transferred (blotted) on a filter, and then a target nucleic acid is detected by using a probe having a nucleotide sequence specific to a target RNA. It is also possible to quantify a target nucleic acid by labeling the probe with a suitable marker such as a fluorescent dye or a radioactive isotope, and by using, for example, a measurement device such as a chemiluminescence imaging analyzer (for example, Light Capture; ATTO Corporation), a scintillation counter, or an imaging analyzer (for example, Fujifilm Corporation: BAS series). The Northern blot method is a well-known, prominent technique in the field and, for example, reference need only be made to Green, M.R. and Sambrook, J. (2012) mentioned above.

[0170] The “microarray method” is a method of detecting a nucleic acid hybridized to a substrate spot by fluorescence or the like by allowing a sample including a target nucleic acid to react on a microarray or microchip in which a nucleic acid fragment complementary to all or a portion of the nucleotide sequence of the target nucleic acid as a probe is disposed as a small spot at a high density on a substrate and solid-phased. The target nucleic acid may be RNA, such as mRNA, or DNA, such as cDNA. Detection and quantification can be achieved by detecting and measuring fluorescence or the like based on the hybridization of the target nucleic acid or the like with a microplate reader or a scanner. The measured fluorescence intensity can be used to determine the mRNA amount or cDNA amount or an abundance ratio thereof with respect to reference mRNA. The microarray method is also a well-known technique in the field. For example, reference need only be made to the DNA microarray method (DNA Maikuroarei to Saishin PCR Hou (DNA Microarray and the Latest PCR Methods) (2000), by Masaaki Muramatsu and Hiroyuki Nawa, Shujunsha Co., Ltd.) and the like.

[0171] The “surface plasmon resonance (SPR) method” is a method of detecting and quantifying with extreme high sensitivity a substance adsorbed on the surface of a thin metal film by utilization of the so-called surface plasmon resonance phenomenon in which as the thin metal film is irradiated with laser beam at varying angles of incidence, reflected light intensity remarkably attenuates at a particular angle of incidence (resonance angle). In the present invention, for example, a probe having a sequence complementary to the nucleotide sequence of the target nucleic acid is immobilized on a thin film metal surface, another thin metal film surface portion is blocked. Subsequently, a sample collected from a subject or a healthy body or a healthy body group is distributed on the thin metal film surface, thereby forming a base pairing between the target nucleic acid and the probe. The target nucleic acid can then be detected and quantified from the difference in the measured values before and after sample distribution. The detection and quantification by the surface plasmon resonance method can be performed by using an SPR sensor commercially available from Biacore, for example. This technique is well-known in the field. Reference can be made to, for example, Kazuhiro Nagata and Hiroshi Handa, Real-Time Analysis of Biomolecular Interactions, Springer Fairlark Tokyo, Tokyo, 2000.

[0172] The “quartz crystal microbalance (QCM) method” is a mass measurement method of quantitatively identifying an exceedingly small amount of an absorbed substance on the basis of the amount of change in resonance frequency by utilization of the phenomenon in which the resonance frequency of a quartz crystal decreases in accordance with the mass of the substance adsorbed onto the surface of electrodes attached to a quartz crystal resonator. Similar to the SPR method, detection and quantification by this method can also be performed by utilizing a commercially available QCM sensor and, for example, the target nucleic acid can be detected and quantified by base pairing a probe having a sequence complementary to the nucleotide sequence of the target nucleic acid and immobilized on the electrode surface and a target nucleic acid in a sample collected from a subject or a healthy body or a healthy body group. This technique is well-known in the field, and reference can be made to, for example, J. Christopher Love, et al., 2005, Self-Assembled Monolayers of a Form of Nanotechnology, Chemical Review, 105: 1103-1169, and Toyosaka Moriizumi and Takamichi Nakamoto, (1997), Sensa Kougaku (Sensor Engineering), Shokodo Co., Ltd.

[0173] The term “nucleic acid amplification method” refers to a method of amplifying a specific region of a target nucleic acid by nucleic acid polymerases by using forward/reverse primers. Examples include a PCR method (including a RT-PCR method), an NASBA method, an ICAN method, and a LAMP (registered trademark) method (including an RT-LAMP method). Preferably, the method is the PCR method. As a method of measuring a transcription product of a gene using the nucleic acid amplification method, a quantitative nucleic acid amplification method such as a real-time RT-PCR method is used. Further, as the real-time RT-PCR method, an intercalator method using SYBR (registered trademark) Green or the like, a TaqMan (registered trademark) probe method, a digital PCR method, and a cycling probe method are known, and any of these methods can be used. Any of these is a known method and described in appropriate protocol in the art, and thus reference can be made thereto.

[0174] The term “RNA sequencing (RNA-Seq) analysis method” refers to a method of measuring the expression level of a gene by converting RNA into cDNA by a reverse transcription reaction, and using next-generation sequencers (for example, HiSeq series (Illumina) and an Ion Proton system (Thermo Fisher), but not limited thereto) to count the number of reads. Any of these is a known method and described in appropriate protocol in the art, and thus reference can be made thereto.

[0175] A method of quantifying the transcription product of a gene by the real-time RT-PCR method will be briefly described below with an example. The real-time RT-PCR method is a method of quantifying a nucleic acid by PCR using a temperature cycler system provided with a function for detecting fluorescence intensity derived from an amplification product in a reaction system in which a PCR amplification product is specifically fluorescence-labeled using, as a template, cDNA prepared from mRNA in a sample by a reverse transcription reaction. The amount of the amplification product of the target nucleic acid in the reaction is monitored in real-time, and regression analysis of the results is performed by a computer. Methods of labeling the amplification product include a method using a fluorescence-labeled probe (for example, the TaqMan (registered trademark) PCR method) and an intercalator method using a reagent that specifically binds to double-stranded DNA. The TaqMan (registered trademark) PCR method is a method using a probe modified with a quencher substance at the 5′ end and a fluorescent dye at the 3′ end. Normally, the quencher substance at the 5′ end suppresses the fluorescent dye at the 3′ end. However, as a result of PCR, the probe is degraded due to 5′->3′ exonuclease activity of the Taq polymerase, which releases the suppression by the quencher substance, resulting in the emission of fluorescence. The fluorescence amount reflects the amount of the amplification product. The number of cycles (CT) when the amplification product reaches the detection limit and the initial template amount are inversely correlated, and thus the initial template amount is quantified by measuring CT in the real-time measurement method. An absolute value of the initial template amount of an unknown sample can be calculated with a calibration curve created by measuring CT using a template of known amounts of several stages. As a reverse transcriptase used in RT-PCR, for example, M-MLV RTase, ExScript RTase (TaKaRa), and Super Script II RT (Thermo Fisher Scientific) can be used.

[0176] The reaction conditions of real-time PCR generally vary depending on the base length of the nucleic acid fragment to be amplified, the amount of a nucleic acid for a template, the base lengths and Tm values of the primers to be used, the optimum reaction temperature and optimum pH of the nucleic acid polymerase to be used, and the like, and therefore need only be determined as appropriate based on the known PCR method in accordance with these conditions. As an example, normally an elongation reaction can be carried out by repeating about 15 to 40 cycles including, as one cycle, a denaturation reaction at 94° C. to 95° C. for five seconds to five minutes, an annealing reaction at 50° C. to 70° C. for ten seconds to one minute, and an elongation reaction at 68° C. to 72° C. for 30 seconds to three minutes. In a case in which a kit commercially available from a manufacturer is used, in principle, the protocol provided with the kit need only be followed.

[0177] The nucleic acid polymerase used in real-time PCR is a DNA polymerase, particularly a heat-resistant DNA polymerase. Such a nucleic acid polymerase is commercially available in various kinds, and these commercially available products can be used. Examples include Taq DNA polymerase provided with the Applied Biosystems TaqMan MicroRNA Assays Kit (Thermo Fisher Scientific). In particular, such a commercially available kit is useful because a buffer optimized for the activity of the provided DNA polymerase or the like is provided therewith.

### 2-3. Method of Differentiating or Classifying

[0178] The differentiation method of the present invention is a method of differentiating or classifying the subtype of breast cancer to which the test sample belongs on the basis of the expression level of the differentiation marker measured as described above. That is, the method of differentiating or classifying according to the present invention includes (b) a step of differentiating or classifying whether the test sample is a desired subtype to be differentiated or classified from the expression levels of the genes included in the marker gene set measured.

[0179] Differentiation markers are genes characteristic of each subtype of breast cancer, and make it possible to differentiate or classify the subtype of breast cancer to which the test sample belongs on the basis of the expression profile of the gene set obtained by combining these genes.

[0180] Here, one embodiment of the method of differentiating or classifying according to the present invention includes, in the step (b), differentiation or classification of the subtype of the test sample by acquiring an expression profile of the gene set from the expression levels of the genes measured, and comparing the expression profile thus acquired and an expression profile of a corresponding gene set in a sample derived from a breast cancer patient having the desired subtype to be differentiated or classified.

[0181] As the expression profile of each gene included in the gene set in the sample derived from a breast cancer patient having a desired subtype to be differentiated or classified, which is to be compared with the test sample, a pre-measured profile may be used, or a profile acquired by measuring the expression level of each gene included in a gene set of a sample derived from a breast cancer patient having the desired subtype to be newly differentiated or classified may be used.

[0182] Accordingly, the method of differentiating or classifying according to the present invention, in one embodiment, further includes a step of measuring expression levels of each gene included in a gene set for differentiating or classifying a subtype of breast cancer in the sample derived from a breast cancer patient having the desired subtype to be differentiated or classified. The expression profile acquired by this step can be compared with the expression profile of the test sample. The sample derived from a breast cancer patient having the desired subtype to be differentiated or classified may be a sample derived from one individual or may include samples derived from two or more individuals. As the number of individuals from whom samples are derived increases, the individual differences of the samples can be further averaged, increasing the accuracy of differentiation, which is thus preferred.

[0183] In another embodiment of the method of differentiating or classifying according to the present invention, in the step (b), the expression profile thus acquired and the expression profile of the corresponding gene set in the sample derived from a breast cancer patient having the desired subtype to be differentiated or classified are compared, and the test sample can be evaluated as being breast cancer of the subtype thus compared when having an expression profile equivalent to the expression profile of the sample thus compared, or can be evaluated as not being breast cancer of the subtype thus compared when having an expression profile of genes different from the expression profile of the sample thus compared.

[0184] For example, when the expression profiles of the test sample and the sample derived from a luminal A-type breast cancer patient are compared and it is determined that the samples have equivalent gene expression profiles, the test sample can be differentiated or classified as breast cancer belonging to the luminal A type. On the other hand, when the expression profiles of the test sample and the sample derived from a luminal A-type breast cancer patient are compared and it is determined that the samples have different gene expression profiles, the test sample can be differentiated or classified as breast cancer not belonging to the luminal A type.

[0185] Here, “have equivalent gene expression profiles” means that the expression profiles of each gene included in the gene set for differentiating or classifying the subtype of breast cancer are similar. Further, “have different gene expression profiles” means that the expression profiles of each gene included in the gene set for differentiating or classifying the subtype of breast cancer are not similar.

[0186] As a specific technique of determining whether the expression profiles of each gene in the gene set are equivalent or different, a known method can be adopted. Although not limited to the following, examples include (i) a method of classifying a test sample into breast cancer of a desired subtype to be differentiated or classified on the basis of hierarchical cluster analysis, (ii) a method of evaluation by comparison of expression levels of genes, and (iii) a method of differentiating whether the test sample belongs to a desired subtype to be differentiated or classified by setting a threshold value.

### (i) Hierarchical Cluster Analysis

[0187] The method of differentiating or classifying according to the present invention is, in one embodiment, a method of differentiating or classifying a subtype of a test sample by cluster analysis of the expression profile of each gene included in the differentiation marker gene set of the test sample.

[0188] More specifically, hierarchical cluster analysis can be performed by comparing the expression profile of the gene set measured in the test sample with the expression profile of a corresponding gene set in a sample derived from a patient with breast cancer belonging to the subtype to be differentiated or classified. When a subtype of a test sample is differentiated or classified by hierarchical cluster analysis, in addition to the expression profile of the gene set in the test sample and the expression profile of the gene set in the sample derived from the patient with breast cancer belonging to the subtype to be differentiated or classified, expression profiles of gene sets in samples derived from patients with breast cancer belonging to subtypes other than the subtype to be differentiated or classified is required so that hierarchical clusters can be created. The samples derived from patients with breast cancer belonging to subtypes other than the subtypes to be differentiated or classified are subtypes other than the subtype to be differentiated or classified, and are samples derived from patients with breast cancer belonging to subtypes selected from a group composed of luminal A, luminal B (HER2 positive), luminal B (HER2 negative), HER2 positive, HER2 positive-like, triple negative, phyllodes tumor, squamous cell carcinoma, normal-like, normal, and undeterminable. The samples derived from patients with breast cancer belonging to subtypes other than the subtype to be differentiated or classified may be samples derived from two or more (three, four, five, six, seven, eight, nine, ten, or 11) patients with breast cancer belonging to different subtypes. In a case in which two or more samples derived from patients with breast cancer belonging to subtypes other than the subtype to be differentiated or classified are used, preferably the samples are an embodiment in which samples derived from patients with breast cancer belonging to all subtypes.

[0189] As the technique of hierarchical cluster analysis, a known technique can be adopted. A particularly preferred embodiment of the present invention is cluster analysis by a group-average method based on the Euclidean distance. For cluster analysis, known software can be used and, for example, while not limited to the following, Expression View Pro software (MicroDiagnostic, Tokyo, Japan) can be used as commercially available software.

[0190] By performing hierarchical cluster analysis, it is possible to draw a hierarchical structure (tree diagram) composed of test samples and samples derived from patients with breast cancer belonging to the subtype to be differentiated or classified, and divide the samples into clusters for each subtype. As a result, it is possible to confirm the cluster of the subtype into which the test sample is classified, and differentiate or classify the subtype to which there is a high possibility of the sample belonging.

### (ii) Method of Evaluation by Comparison of Expression Levels of Genes

[0191] Further, in one embodiment, the histological type of the test sample can be evaluated by comparing the total value of the expression levels of the genes in the combination of each gene included in the gene set in the test sample and the total value of the expression levels of the genes in the sample derived from the patient with breast cancer belonging to the subtype to be differentiated or classified.

[0192] Although not limited to the following, the present invention will be described with reference to one embodiment. The total values of the expression levels of the genes included in the gene set of a group of patients suffering from breast cancer belonging to the subtype to be differentiated or classified and a group of patients suffering from breast cancer belonging to subtypes other than the subtype to be differentiated or classified subtype are respectively plotted as a group scatter diagram, and the position where the total value of the expression levels of the genes of the gene set in the test sample is plotted is checked. The plotted positions can be used to assess the subtype of breast cancer to which there is a high possibility of the test sample belonging.

[0193] It should be noted that the gene set and the genes included therein are selected in accordance with the subtype as genes characteristic of the desired subtype to be differentiated or classified, and therefore the group of patients suffering from breast cancer belonging to subtypes other than the subtype to be differentiated or classified, which is the comparison control, may be a group of patients suffering from breast cancer belonging to any subtype as long as a subtype other than the subtype to be differentiated or classified. Preferably, the group is a group of patients suffering from breast cancer belonging to the normal subtype. Further, in one embodiment, the samples derived from patients with breast cancer belonging to subtypes other than the subtype to be differentiated or classified, which is used as the comparison control, are two or more (three, four, five, six, seven, eight, nine, ten, or 11) samples derived from patients with breast cancer belonging to different subtypes and, in a more preferred embodiment, are samples derived from patients with breast cancer belonging to all subtypes.

[0194] It should be noted that, when the total value of the expression levels of the genes is used for differentiation, the values of the obtained expression levels of the MBOAT1 gene, PADI2 gene, and PPP1R1B gene are used after being inverted. For example, when the total value of the expression level of each gene obtained by a method such as microarray is utilized, the expression levels of the MBOAT1 gene, PADI2 gene, and PPP1R1B gene (for example, Log2 ratio with respect to a common reference) are multiplied by -1 to find the inverted values, and the total value of the inverted values and the expression levels of the other genes is calculated.

(iii) Method of Differentiating or Classifying by Setting Threshold Value

[0195] Further, in one embodiment, the histological type can be differentiated by comparing the expression profile of the gene set of a test sample with a predetermined threshold value.

[0196] Here, the term “predetermined threshold value” refers to a predetermined cutoff value based on the expression profile of the differentiation marker in the sample derived from the breast cancer patient group belonging to the desired subtype to be differentiated or classified. The cutoff value can be set as follows, for example, but is not limited thereto. That is, the expression levels of genes included in the gene sets in samples derived from a breast cancer patient group (discriminant patient group) belonging to a desired subtype to be differentiated or classified and a breast cancer patient group (control patient group) belonging to a subtype other than the subtype to be differentiated or classified are measured, and the expression levels of the genes are calculated for each sample. Next, a predetermined cutoff value can be derived by creating a receiver operating characteristic curve (ROC) curve from the values of the expression levels of the genes thus obtained. By setting a cutoff value, it is possible to differentiate the histological type to which there is a high possibility of the ovarian cancer belonging by whether or not the cutoff value is exceeded.

[0197] In one embodiment, a group of patients suffering from breast cancer (control patient group) belonging to a subtype other than the subtype to be differentiated or classified may be a group of patients suffering from breast cancer belonging to any subtype as long as a subtype other than the subtype to be differentiated or classified. Further, in another embodiment, as the samples derived from patients with breast cancer belonging to subtypes other than the subtype to be differentiated or classified, two or more (three, four, five, six, seven, eight, nine, ten, or 11), preferably all, samples derived from patients with breast cancer belonging to different subtypes are used as comparison controls.

[0198] As a more specific embodiment, when cutoff values for genes belonging to the groups a to o are set, it is possible to create an ROC curve upon comparison of the gene expression levels between the following two groups (discriminant patient group and control patient group), and set the cutoff value. Nevertheless, the setting of the cutoff value is not limited to the following embodiment.

[0199] Group a: A group with a high expression of genes included in the gene group (group a) showing an expression pattern characteristic of squamous cell carcinoma can be set as the discriminant patient group for “squamous cell carcinoma,” and a group with a low expression of the genes can be set as the control patient group for “non-squamous cell carcinoma.”

[0200] Group b: A group with a high expression of genes included in the gene group (group b) showing an expression pattern characteristic of phyllodes tumor can be set as the discriminant patient group for “phyllodes tumor,” and a group with a low expression of the genes can be set as the control patient group for “non-phyllodes tumor.”

[0201] Group c: A group having normal tissue with a low expression of genes included in the gene group (group c) showing an expression pattern characteristic of cancer can be set as the control patient group for “non-cancer,” and a group having breast cancer tissue belonging to any subtype other than that of normal tissue with a high expression of the genes can be set as the discriminant patient group for “cancer.”

[0202] Group d: A group having normal tissue with a high expression of genes included in the gene group (group d) showing an expression pattern characteristic of normal tissue can be set as the discriminant patient group for “normal,” and a group having tissue other than normal tissue with a low expression of the genes can be set as the control patient group for “non-normal.” (It should be noted that the normal-like group that resembles normal and the group lacking characteristics are not included in either “normal” or “non-normal.”)

[0203] Group e: A group with a high expression of genes included in the gene group (group e) showing an expression pattern characteristic of normal-like can be set as the discriminant patient group for “normal-like,” and a group of luminal A, luminal B, HER2 amplification+, HER2-like, or triple negative with a low expression of the genes can be set as the control patient group for “non-normal-like.”

[0204] Groups f, g, h: A triple negative group with a high expression of genes included in the gene group (group 0 showing an expression pattern characteristic of triple negative and showing an expression pattern characteristic of normal tissue or normal-like, the gene group (group g) showing an expression pattern characteristic of triple negative, and the gene group (group h) showing an expression pattern characteristic of triple negative and similar to the expression pattern of genes defined as undeterminable can be set as the discriminant patient group for “TNBC,” and a group of luminal A, luminal B, HER2 amplification+, and HER2-like with a low expression of the genes can be set as the control patient group for “non-TNBC.”

[0205] Group i: A group of HER2-like and HER2 amplification+with a high expression of genes included in the gene group (group i) showing an expression pattern characteristic of HER2+-like can be set as the discriminant patient group for “HER2-like,” and a group of luminal A, luminal B, and triple negative with a low expression of the genes can be set as the control patient group for “non-HER2-like.”

[0206] Groups j, k: A group of HER2 amplification+and luminal B with a high expression of genes included in the gene group (group j) related to HER2 amplification and positioned close to the HER2 gene on the chromosome, or in a gene group (group k) related to HER2 amplification and other than the group j can be set as the discriminant patient group for “amplification,” and a luminal A group, a HER2-like group, and a triple negative group with a low expression of the genes can be set as the control patient group for “no amplification.” At this time, the group “amplification” may have variations in the expression of the genes included in the group j and the group k, and preferably a group with a high expression of at least five genes included in the group j and the group k is adopted.

[0207] Groups l, m: A group of luminal A or luminal B with a high expression of genes included in a hormone sensitivity-related gene group (group 1) or ESR1 genes (group m) can be set as the discriminant patient group for “hormone sensitivity,” and a HER2 amplification+group, a HER2-like group, and a triple negative group with a low expression of the genes can be set as the control patient group for “no hormone sensitivity.”

[0208] Group n: A group of luminal A, luminal B, HER2 amplification+, and HER2-like with a high expression of genes included in the differentiation-related gene group (group n) can be set as the discriminant patient group for “differentiated,” and a group of triple negative with a low expression of the genes can be set as the control patient group for “undifferentiated.”

[0209] Group o: A “fast-growth group” with a high expression of genes included in the cell cycle-related gene group (group o) can be set as the discriminant patient group, and a “slow-growth group” with a low expression of the genes can be set as the control patient group.

[0210] It should be noted that, for the discriminant patient groups and the control patient groups, the results of respective classification by cluster analysis may be used. For example, in the group e, the patient group classified as “normal-like” by cluster analysis can be adopted in the discriminant patient group of “normal-like”, and the patient group classified as luminal A, luminal B, HER2 amplification+, HER2-like, and triple negative by cluster analysis can be adopted in the control patient group of “non-normal-like”.

[0211] A “receiver operating characteristic (ROC) curve” is created by plotting with a vertical axis representing the true position fraction (TPF), that is, sensitivity, and a horizontal axis representing the false position fraction (FPF), that is, (1-specificity), while changing the cutoff point as a parameter, which represents the threshold value for determining the result of the test as positive. Specificity means a rate at which a negative subject is accurately determined to be negative.

[0212] The method of setting the cutoff value from the created ROC curve can basically be set to increase both sensitivity and specificity (to approach 1). For that purpose, the cutoff value need only be set to a value giving a point closest to the point (0, 1) on the ROC curve. In the most preferred embodiment, a cutoff value is set to a value that can clearly differentiate a sample derived from a group of patients suffering from breast cancer belonging to a subtype to be differentiated or classified and a sample derived from all breast cancer patient groups belonging to subtypes other than the subtype to be differentiated or classified.

[0213] When a predetermined threshold value is set as described above, the comparison between the threshold value and the expression profile of the gene set in the sample derived from the subject need only be a comparison between the threshold value and the total value of the expression levels of the genes in the gene set for differentiating or classifying the predetermined subtype in the test sample.

### (iv) Method of Differentiation or Classification on the Basis of Subtype Differentiation Score

[0214] Further, in one embodiment, the subtype of breast cancer can be differentiated or classified on the basis of a subtype differentiation score.

[0215] As mentioned above, by using one subtype differentiation score or a combination of a plurality of subtype differentiation scores for each breast cancer subtype, it is possible to differentiate or classify whether the test sample is the desired subtype (above-described Table 5).

[0216] Here, the subtype differentiation score can be determined by measuring the expression levels of genes included in the appropriate groups from the differentiating gene groups of the groups a to o, in accordance with the above-described Table 4. More specifically, each subtype differentiation score can be calculated by the following equations (I) to (IX):

Cancer score=(c×“Regression coefficient calculated by multiple logistic regression analysis in group c”−d×“Regression coefficient calculated by multiple logistic regression analysis in group d”)÷(“Regression coefficient calculated by multiple logistic regression analysis in group c”+“Regression coefficient calculated by multiple logistic regression analysis in group d”) (I)

Cell cycle score=o (II)

Squamous cell score=a (III)

Phyllodes tumor score=b (IV)

Normal-like score=e (V)

Triple negative score=(f×“Regression coefficient calculated by multiple logistic regression analysis in group f”+g×“Regression coefficient calculated by multiple logistic regression analysis in group g”+h×“Regression coefficient calculated by multiple logistic regression analysis in group h”−n×“Regression coefficient calculated by multiple logistic regression analysis in group n”)÷(“Regression coefficient calculated by multiple logistic regression analysis in group f”+“Regression coefficient calculated by multiple logistic regression analysis in group g”+“Regression coefficient calculated by multiple logistic regression analysis in group h”+“Regression coefficient calculated by multiple logistic regression analysis in group n”) (VI)

HER2-like score=I (VII)

HER2 amplification score=(j×“Regression coefficient calculated by multiple logistic regression analysis in group j”+k×“Regression coefficient calculated by multiple logistic regression analysis in group k”)÷(“Regression coefficient calculated by multiple logistic regression analysis in group j”+“Regression coefficient calculated by multiple logistic regression analysis in group k”) (VIII)

Hormone sensitivity score=(1×“Regression coefficient calculated by multiple logistic regression analysis in group l”+m×“Regression coefficient calculated by multiple logistic regression analysis in group m”) ±(“Regression coefficient calculated by multiple logistic regression analysis in group l”+“Regression coefficient calculated by multiple logistic regression analysis in group m”) (IX)

[0217] (In the general equations (I) to (IX), a to o respectively mean “gene expression scores of the groups a to o.”)

[0218] Here, the “gene expression score of the groups a to o,” in one embodiment, can be calculated by comparison with the cutoff value. For example, the score can be set to “1” in a case in which the gene expression is higher than the cutoff value, and to “−1” in a case in which the gene expression is lower than the cutoff value. In a case in which a plurality of genes are selected from each group of the groups a to o, the average value of the scored values (maximum value is 1, and minimum value is −1) can be calculated and used for each group.

[0219] As described above, in one embodiment, the subtype differentiation score can be calculated using the “gene expression scores of the groups a to o.” At this time, the values can be scored using 1 as the maximum value and −1 as the minimum value, and a higher score indicates a higher possibility of the corresponding subtype.

[0220] When a plurality of differentiating gene groups are used to calculate the subtype differentiation score (for example, calculation of the triple negative score), for example, the regression coefficients calculated by multiple logistic regression analysis can be multiplied by the average value of the gene expression scores of each differentiating gene group and then that value can be divided by the sum of the regression coefficients so that the maximum value is 1 and the minimum value is −1.

[0221] After the subtype differentiation score is determined, the histological type of breast cancer can be differentiated as follows:

[0222] (1) The highest score of the scores of “triple negative,” “HER2 amplification,” “hormone sensitivity,” “HER2+-like,” “phyllodes tumor,” and “normal-like” is found.

[0223] (2) If “triple negative” has the highest score of the six scores and the score is high (for example, a score higher than 0.2), the type is determined to be “TNBC.”

[0224] (3) If “HER2 amplification” has the highest score of the six scores and the score is high (for example, a score higher than 0.2), and the score of “hormone sensitivity” is high (for example, a score higher than 0), the type is determined to be “luminal B-HER2+.” If the score of “HER2 amplification” is the highest and a high score (for example, a score higher than 0.2), and the score of “hormone sensitivity” is low (for example, a score of 0 or lower), the type is determined to be “HER2+.”

[0225] (4) If “hormone sensitivity” has the highest score of the six scores and the score is high (for example, a score higher than 0), and the score of “HER2 amplification” is high (for example, a score higher than 0.2), the type is determined to be “luminal B-HER2+.” If the score of “hormone sensitivity” is the highest and a high score (for example, a score higher than 0), and the score of “HER2 amplification” is low (for example, a score of 0.2 or lower), the type is determined to be “luminal A (provisional).” Among “luminal A (provisional),” if the score of “cell cycle” is high (for example, a score higher than 0), the type is determined to be “luminal B-HER2−,” and if the score of “cell cycle” is low (for example, a score of 0 or lower), the type is determined to be “luminal A.”

[0226] (5) If “HER2+-like” has the highest score of the six scores and the score is high (for example, a score higher than 0.2), and the score of “HER2 amplification” is high (for example, a score higher than 0.2), the type is determined to be “HER2+.” If the score of “HER2+-like” is the highest and a high score (for example, a score of 0.2 or higher), and the score of “HER2 amplification” is low (for example, a score of 0.2 or lower), the type is determined to be “HER2+-like.”

[0227] (6) If “phyllodes tumor” has the highest score of the six scores and the score is high (for example, a score higher than 0.1), the type is determined to be “phyllodes tumor.”

[0228] (7) If “normal-like” has the highest score of the six scores and the score is high (for example, a score higher than 0.1), the type is determined to be “normal-like.”

[0229] (8) Among the cases that do not belong to any of the above types based on each determination up to (7), for a case in which both the “cancer” and “cell cycle” scores are low (for example, 0 or lower), the type is determined to be “normal-like.”

[0230] (9) For a case that does not belong to any of the above types based on each determination up to (8), the type is determined to be “undeterminable.”

[0231] (10) For a case in which the score of “squamous cell carcinoma” is high (for example, 0.2 or higher), “squamous cell carcinoma” is also added to the subtype determination described above.

[0232] Here, “a subtype differentiation score is high” basically means that the score exceeds 0 when scored with the maximum value being 1 and the minimum value being −1. “A subtype differentiation score is low” basically means that the score is less than 0 when scored with the maximum value being 1 and the minimum value being −1. At this time, the closer each subtype differentiation score is to 1, the higher the possibility of that subtype, and the closer to −1, the higher the possibility of not being that subtype. As illustrated in the example described above, the criteria for “high score” or “low score” can be set as appropriate. By setting the criteria closer to the maximum value 1 (upper limit) side or the minimum value −1 (lower limit) side from 0, it is possible to lower the pseudo-positive rate at the time of differentiation or classification of the breast cancer subtype.

[0233] Further, the method of differentiating the histological type of breast cancer using the subtype differentiation score is not limited to the method described above, and may be set as appropriate according to the types and number of subtype differentiation scores to be used.

### 2-3. Advantageous Effects

[0234] According to the differentiation or classification method of this aspect, by examining a specimen removed by biopsy or surgery, it is possible to differentiate or classify the subtype of breast cancer to which the specimen belongs. With the differentiation method of this aspect having a high accuracy, it is possible to diagnose the subtype to which the breast cancer belongs, resulting in the advantage that action can be taken in consideration of recurrence risk and treatment method determination.

3. Kit for Differentiating or Classifying Subtype of Breast Cancer to which Test Sample Derived from Breast Cancer Patient Belongs

### 3-1. Overview

[0235] Another aspect of the present invention is a reagent (differentiating reagent) for differentiating or classifying the subtype to which the breast cancer belongs. By applying the differentiating reagent of this aspect to, for example, a sample derived from a subject suffering from breast cancer, it is possible to differentiate the subtype to which the breast cancer of the subject belongs.

### 3-1-1. Configuration

[0236] The differentiating reagent of this aspect includes a set of probes or primers for detecting transcription products, that is, mRNAs or cDNAs, of a differentiating gene group constituting differentiation markers. A specific configuration thereof is described in the section on the measurement step. For example, in a case in which the transcription products of a differentiating gene group of four kinds of genes constituting differentiation markers are to be detected, the differentiating kit may include a group of four kinds of probes capable of detecting the transcription products of the corresponding genes.

[0237] In a case in which the differentiating reagent of this aspect are probes such as described above, the differentiating reagent can also be provided in a state of a DNA microarray or a DNA microchip in which each probe is immobilized on a substrate. Although material of the substrate for immobilizing each probe is not limited, a glass plate, a quartz plate, a silicon wafer, or the like is usually used. Examples of the size of the substrate include 3.5 mm×5.5 mm, 18 mm×18 mm, and 22 mm×75 mm, which can be set variously depending on the number of spots and spot sizes for each probe.For a probe, 0.1 μg to 0.5 μg of nucleotides are usually used per spot. Examples of a method of immobilizing nucleotides include a method in which nucleotides are electrostatically bound to a solid-phase carrier surface-treated with a polycation such as polylysine, poly-L-lysine, polyethyleneimine, or polyalkylamine with the use of charges of nucleotides, and a method in which nucleotides, into which a functional group such as an amino group, an aldehyde group, an SH group, or biotin has been introduced, are covalently bound to the surface of a solid phase, onto which a functional group such as an amino group, an aldehyde group, or an epoxy group has been introduced.

### 3-2. Advantageous Effects

[0238] By using the differentiating kit of this aspect and applying the kit to a subject having a history of breast cancer, it is possible to objectively and accurately differentiate the subtype to which the breast cancer belongs.

[0239] The detection kit of the present invention may include other reagents necessary for the detection of a differentiation marker, such as, for example, a buffer and a secondary antibody, and instructions for detection and differentiation of results.

### 4. Treatment Method Based on Results of Differentiation or Classification

[0240] As another aspect, the present invention provides a treatment method in which an anticancer drug is administered to a subject for whom breast cancer has been differentiated or classified as belonging to a subtype by the differentiation method described above, based on the result of differentiation or classification.

[0241] That is, an effective amount of an anticancer drug effective for breast cancer belonging to a specific subtype is administered to a subject for whom breast cancer has been differentiated or classified as belonging to the specific subtype by the differentiation method of the present invention.

[0242] Anticancer drugs (for example, paclitaxel, cisplatin, carboplatin, or docetaxel) and combinations thereof, administration methods, dosages, and the like effective for breast cancer belonging to each subtype are known, and those skilled in the art can implement chemotherapy in accordance with the histological type, as appropriate.

[0243] Hereinafter, the present invention will be described in more detail with reference to examples, but is not limited to the following embodiments.

### EXAMPLES

### Example 1

### Preparation of RNA

[0244] For breast cancer tissue collected surgically, total RNA was extracted using ISOGEN (Nippon Gene Co., Ltd., Tokyo, Japan). Further, normal mammary gland tissue and a portion of breast cancer tissue were purchased from overseas dealers, and total RNA was extracted in the same manner. Regarding the samples for which 125 μg or more of total RNA was successfully acquired, poly(A)+RNA was subsequently purified therefrom using a MicroPoly(A) purist Kit (Ambion, Austin, Tex., USA).

[0245] As the human common reference RNA, Human Universal Reference RNA Type I (MicroDiagnostic) or Human Universal Reference RNA Type II (MicroDiagnostic) was used.

### Example 2

### Comprehensive Gene Expression Analysis

[0246] A DNA microarray used for gene expression profile acquisition based on poly(A)+RNA (named “System 1”) was prepared by forming an array, using a custom arrayer, of 31,797 kinds of synthetic DNA (80 mers) (MicroDiagnostic) corresponding to human-derived transcription products on a slide glass. On the other hand, a DNA microarray for gene expression profile acquisition based on total RNA (named “System 2”) was prepared by forming an array, using a custom arrayer, of 14,400 kinds of synthetic DNA (80 mers) (MicroDiagnostic) corresponding to human-derived transcription products on a slide glass.

[0247] A specimen-derived RNA was prepared by synthesizing labeled cDNA from 2 μg of poly(A)+RNA for System 1 and from 5 μg of total RNA for System 2 using SuperScript II (Invitrogen Life Technologies, Carlsbad, CA, USA) and Cyanine 5-dUTP (Perkin-Elmer Inc.). Similarly, human common reference RNA was prepared by synthesizing labeled cDNA from 2 λg of poly(A)+RNA or 5 μg of total RNA using SupreScript II and Cyanine 3-dUTP (Perkin-Elmer Inc.).

[0248] Hybridization with a DNA microarray was performed using a Labeling and Hybridization kit (MicroDiagonostic).

[0249] The fluorescence intensity after hybridization with the DNA microarray was measured using a GenePix 4000B Scanner (Axon Instruments, Inc., Union City, Calif., USA). Further, the expression ratio (fluorescence intensity of Cyanine-5-labeled cDNA derived from the specimen/fluorescence intensity of Cyanine-3-labeled cDNA derived from the human common reference RNA) was calculated by dividing the fluorescence intensity of the Cyanine-5-labeled cDNA derived from the specimen by the fluorescence intensity of the Cyanine-3-labeled cDNA derived from the human common reference RNA. Furthermore, using GenePix Pro 3.0 software (Axon Instruments, Inc.), the calculated expression ratio was multiplied by a normalization factor for normalization. Next, the expression ratio was converted to Log2, and the converted value was named the Log2 ratio. It should be noted that the expression ratio was converted using Excel software (Microsoft, Bellevue, Wash., USA) and a MDI gene expression analysis software package (MicroDiagnostic).

### Example 3

### Effective Markers for Subtype Differentiation of Breast Cancer

[0250] The present invention provides a set of 199 gene markers (207 when including the eight control genes used as controls) having expression patterns correlated with subtypes of breast cancer by cluster analysis.

[0251] The gene expression profiles of 14,400 genes were acquired from each specimen of 470 cases including breast cancer tissue (453 cases) and normal mammary gland tissue (17 cases). Eight genes were selected as controls from among genes for which a signal could be detected in three or less specimens, the absolute value of the expression ratio was less than 0.45, the standard deviation was less than 0.35, the maximum−minimum value was less than 2.2, and the average value of “sum of medians” exceeded 400.

[0252] Next, the 453 cases of breast cancer tissue excluding normal tissue were classified into a group having ESR1 and ERBB2 expression level ratios of 2.0 or greater, a group having an ESR1 expression level ratio of 2.0 or greater and an ERBB2 expression level ratio less than 2.0, a group having an ERBB2 expression level ratio of 2.0 or greater and an ESR1 expression level ratio less than 2.0, and a group having ESR1 and ERBB2 expression level ratios less than 2.0. A four-group comparison was conducted on the basis of these four groups, and 374 kinds of genes having a p-value less than 0.01 and an absolute value of the difference in the averages of the expression ratios of 1.0 or more were extracted.

[0253] Furthermore, genes characteristic of squamous cell carcinoma, phyllodes tumor, and normal tissue were selected by a two-group comparison by a t-test. These genes were classified into a gene group showing the expression pattern characteristic of squamous cell carcinoma (hereinafter referred to as “group a”), a gene group showing an expression pattern characteristic of a phyllodes tumor (hereinafter referred to as group “b”), a gene group showing an expression pattern characteristic of cancer (hereinafter referred to as “group c”), a gene group showing an expression pattern characteristic of normal tissue (hereinafter referred to as “group d”), a gene group showing an expression pattern characteristic of normal-like (hereinafter referred to as “group e”), a gene (hereinafter referred to as “TNBC1”) group showing an expression pattern characteristic of the triple negative group and showing an expression pattern characteristic of normal tissue or normal-like (hereinafter referred to as “group f”), a gene (hereinafter referred to as “TNBC2”) group showing an expression pattern characteristic of the triple negative (hereinafter referred to as “group g”), a gene (hereinafter referred to as “TNBC3”) group showing an expression pattern characteristic of the triple negative and similar to the expression pattern of genes defined as undeterminable (hereinafter referred to as “group h”), a gene group showing an expression pattern characteristic of HER2+-like (hereinafter referred to as “group i”), a gene (hereinafter referred to as “HER2 amplification-1”) group related to HER2 amplification and positioned close to the HER2 gene on the chromosome (hereinafter referred to as “group j”), a gene (hereinafter referred to as “HER2 amplification-2”) group related to HER2 amplification other than group j (hereinafter referred to as “group k”), a hormone sensitivity-related gene group (hereinafter referred to as “group 1”), ESR1 (hereinafter referred to as “group m”), differentiation-related gene group (hereinafter referred to as “group n”), and a cell cycle-related gene group (hereinafter referred to as “group o”). Considering the overall balance, each group was adjusted to be between one and 37 genes. For groups with an insufficient number of genes, genes showing behavior similar to the genes in the group were added using a correlation coefficient. From among the genes extracted in this way, 199 genes that could clearly classify clusters (eight genes in group a, eight genes in group b, four genes in group c, ten genes in group d, nine genes in group e, six genes in group f, 35 genes in group g, seven genes in group h, 37 genes in group i, five genes in group j, six genes in group k, 29 genes in group 1, one gene in group m, 11 genes in group n, and 23 genes in group o) were selected. The above-described eight genes selected as controls were combined with these to form a marker gene group of 207 genes for breast cancer subtype differentiation. It should be noted that the selected 199 genes described above are the gene group shown in Tables 2A and 2B, and the 199 genes are classified into the groups a to o as shown in Tables 2A and 2B. Further, the sequence information of the probes for the 207 genes used in this example is shown in the tables below.

### Example 4

### Cluster Analysis Using Differentiation Marker Gene Set For Breast Cancer −1

[0254] Using the set of the 207 kinds of genes selected in Example 3 as the differentiation marker gene set, the gene expression level of each gene was measured (data not shown), and cluster analysis was performed. Further, cluster analysis was performed by the group-average method based on Euclidean distance using Expression View Pro software (MicroDiagnostic). The results of cluster analysis are shown in FIG. 1. As shown in FIG. 1, when hierarchical cluster analysis was performed on the basis of the expression profiles of the extracted 207 genes, the genes could be classified into the clusters of a normal-like group, an undeterminable group, a normal group, a luminal A group, a HER2+-like group, a luminal B group, a HER2+ group, a triple negative group, and an other group.

### Example 5

### Scoring by Differentiation Marker Gene Set

[0255] ROC analysis of each gene was performed for the differentiation marker gene set including the 207 kinds of genes selected in Example 3 to determine cutoff values. It should be noted that the cutoff value was appropriately determined for each gene group as a value at which sensitivity=specificity. The details of the ROC analysis are as follows.

[0256] When a cluster analysis of 470 cases was performed using eight genes belonging to the group a, the cases were classified into two clusters. A cluster including five cases with a high marker expression, including cases clinically diagnosed as squamous cell carcinoma, was defined as “squamous cell carcinoma,” and a cluster including 465 cases with a low expression was defined as “non-squamous cell carcinoma.” ROC analysis was conducted for each of the eight genes in the 470 cases, with “squamous cell carcinoma” as the discriminant patient group and “non-squamous cell carcinoma” as the control patient group, and the cutoff value was calculated.

[0257] When a cluster analysis of 470 cases was performed using eight genes belonging to the group b, the cases were classified into two clusters. A cluster including three cases with a high marker expression, including cases clinically diagnosed as malignant phyllodes tumor, was defined as “phyllodes tumor,” and a cluster including 467 cases with a low expression was defined as “non-phyllodes tumor.” ROC analysis was conducted for each of the eight genes in the 470 cases, with “phyllodes tumor” as the discriminant patient group and “non-phyllodes tumor” as the control patient group, and the cutoff value was calculated.

[0258] Normal tissue was defined as “non-cancer,” and other tissue was defined as “cancer.” ROC analysis was conducted for each of four genes belonging to the group c in the 470 cases, with “cancer” as the discriminant patient group and “non-cancer” as the control patient group, and the cutoff value was calculated.

[0259] Normal tissue was defined as “normal,” and other tissue was defined as “non-normal.” However, the normal-like group that resembles normal and the group lacking characteristics were excluded from “normal” and “non-normal.” ROC analysis was conducted for each of ten genes belonging to the group d in 435 cases, with “normal” as the discriminant patient group and “non-normal” as the control patient group, and the cutoff value was calculated.

[0260] In the cluster analysis of 207 genes×470 cases, cases included in the cluster of normal-like (including normal tissue) were defined as “normal-like,” and cases included in the cluster of luminal A, luminal B, HER2 amplification+, HER2-like, and triple negative were defined as “non-normal-like.” ROC analysis was conducted for each of nine genes belonging to the group e in 428 cases, with “normal” as the discriminant patient group and “non-normal” as the control patient group, and the cutoff value was calculated.

[0261] In the cluster analysis of 207 genes×470 cases, cases included in the cluster of the triple negative group were defined as “TNBC,” and cases included in the cluster of luminal A, luminal B, HER2 amplification+, and HER2-like were defined as “non-TNBC.” ROC analysis was conducted for each of 48 genes belonging to the group f, the group g, or the group h in the 407 cases, with “TNBC” as the discriminant patient group and “non-TNBC” as the control patient group, and the cutoff value was calculated.

[0262] In the cluster analysis of 207 genes×470 cases, cases included in the cluster of HER2-like and HER2 amplification+were defined as “HER2-like,” and cases included in the cluster of luminal A, luminal B, and triple negative were defined as “non-HER2-like.” ROC analysis was conducted for each of 37 genes belonging to the group i in 407 cases, with “HER2-like” as the discriminant patient group and “non-HER2-like” as the control patient group, and the cutoff value was calculated.

[0263] In the cluster analysis of 207 genes×470 cases, 44 cases included in the cluster of HER2 amplification+and luminal B were subjected to cluster analysis with 11 genes belonging to the group j or the group k. With each amplification region being different and the clusters being divided according to the range, the cases were divided into “amplification” and “no amplification” for each amplification region (29 cases of “amplification” in all 11 genes; three cases of “amplification” in eight genes; three cases of “amplification” in seven genes; and nine cases of “amplification” in five genes). Cases included in the cluster of the luminal A group, the HER2-like group, and the triple negative group were defined as “no amplification.” ROC analysis was conducted for each of the 11 genes in 407 cases, with “amplification” as the discriminant patient group and “no amplification” as the control patient group, and the cutoff value was calculated.

[0264] In the cluster analysis of 207 genes×470 cases, cases included in the cluster of the luminal A group and the luminal B group were defined as “hormone sensitivity,” and cases included in the cluster of the HER2 amplification+group, the HER2-like group, and the triple negative group were defined as “no hormone sensitivity.” ROC analysis was conducted for each of 30 genes included in the group 1 or the group m in 407 cases, with “hormone sensitivity” as the discriminant patient group and “no hormone sensitivity” as the control patient group, and the cutoff value was calculated.

[0265] In the cluster analysis of 207 genes×470 cases, cases included in the cluster of the luminal A group, the luminal B group, the HER2 amplification+group, and the HER2-like group were defined as “differentiated,” and cases included in the cluster of triple negative were defined as “undifferentiated.” ROC analysis was conducted for each of 11 genes belonging to the group n in the 407 cases, with “differentiated” as the discriminant patient group and “undifferentiated” as the control patient group, and the cutoff value was calculated.

[0266] When a cluster analysis of 470 cases was performed using 23 genes belonging to the group o, the cases were classified into two clusters. A cluster with a high marker expression, including many cases clinically diagnosed as triple negative, was defined as “fast-growth group,” and a cluster with a low expression was defined as “slow-growth group.” ROC analysis was conducted for each of the 23 genes in 470 cases, with “fast-growth group” as the discriminant patient group and “slow-growth group” as the control patient group, and the cutoff value was calculated.

[0267] For each case, given 1 when the expression ratio was larger than the cutoff value, −1 when the expression ratio was smaller than the cutoff value, and 0 when the data was 0, the average value was calculated for each gene group of the groups a to o. However, for one gene (MBOAT1) belonging to the group i and two genes (PADI2 and PPP1R1B) belonging to the group 1, the appearance of the characteristics thereof increases as the expression ratio decreases, which is the reverse of the other genes, and therefore the average value was calculated given 1 when the expression ratio was smaller than the cutoff value, −1 when the expression ratio was larger than the cutoff value, and 0 when the data was 0.

[0268] The subtype differentiation scores (cancer score, cell cycle score, squamous cell score, phyllodes tumor score, normal-like score, triple negative score, HER2-like score, HER2 amplification score, and hormone sensitivity score) were calculated using the average value of each gene group obtained in each case. Specifically, each subtype differentiation score was calculated as follows. The maximum value of each subtype differentiation score was 1, the minimum value was −1, and a higher score indicates a higher likelihood.

[0269] Cancerscore =(c×2.5−d×5.5)÷8

[0270] Cell cycle score=o

[0271] Squamous cell score=a

[0272] Phyllodes tumor score=b

[0273] Normal-like score=e

[0274] Triple negative score=(f×2.6+g×11.4+h×2.4−n×6.8)÷23.2

[0275] HER2-like score=i

[0276] HER2 amplification score=(j×3.8+k×0.7)÷4.5

[0277] Hormone sensitivity score=(1×5.3+m×0.4)÷5.7

[0278] It should be noted that, in this example, because a plurality of gene groups (groups a to o) are used for calculation, the regression coefficients calculated by multiple logistic regression analysis were respectively multiplied by the average value of each gene group, and then that value was divided by the sum of the regression coefficients so that the maximum value was 1 and the minimum value was −1. 470 cases were used for each, and the details are as follows: For “cancer,” the objective variable was set to 0 for normal tissue and to 1 for non-normal tissue, and the scores of the “cancer” and “normal” gene groups were used as explanatory variables. For “triple negative,” the objective variable was set to 1 for cases included in the cluster of triple negative by the cluster analysis of 207 genes×470 cases and to 0 for all others, and the scores of “TNBC1,” “TNBC2,” and “TNBC3” were used as explanatory variables. For “HER2 amplification,” the objective variable was set to 1 for cases included in the HER2+amplification and luminal B by the cluster analysis of 207 genes×470 cases and to 0 for all others, and the scores of “HER2 amplification 1” and “HER2 amplification 2” were used as explanatory variables. For “hormone sensitivity,” the objective variable was set to 1 for cases included in the luminal A and luminal B by the cluster analysis of 207 genes×470 cases and to 0 for all others, and the scores of “hormone sensitivity” and “ESR1” were used as explanatory variables.

[0279] By the above-described equations, it was possible to score each calculated subtype differentiation score for the 470 cases. The scored results are shown in FIG. 2 (the vertical axis of the heat map in FIG. 2 indicates the subtype differentiation score, and the horizontal axis indicates the samples derived from 470 cases. Further, in FIG. 2, the arrangement of the samples derived from 470 cases on the horizontal axis shows the same arrangement as in the heat map in FIG. 1, and the subtype classification shown in the lower section of FIG. 2 shows the cluster analysis results in FIG. 1).

### Example 6

### Histological Type Differentiation of Breast Cancer by Subtype Differentiation Score−1

[0280] On the basis of the subtype differentiation score obtained in Example 5, the histological type of breast cancer was differentiated as follows.

[0281] (1) The highest score of the scores of “triple negative,” “HER2 amplification,” “hormone sensitivity,” “HER2+-like,” “phyllodes tumor,” and “normal-like” was found.

[0282] (2) If “triple negative” had the highest score of the six scores and the score was higher than 0.2, the type was determined to be “TNBC.”

[0283] (3) If “HER2 amplification” had the highest score of the six scores and the score was higher than 0.2, and the score of “hormone sensitivity” was higher than 0, the type was determined to be “luminal B-HER2+.” If the score of “HER2 amplification” was the highest and higher than 0.2, and the score of “hormone sensitivity” was 0 or lower, the type was determined to be “HER2+.”

[0284] (4) If “hormone sensitivity” had the highest score of the six scores and the score was higher than 0, and the score of “HER2 amplification” was higher than 0.2, the type was determined to be “luminal B-HER2+.” If the score of “hormone sensitivity” was the highest and higher than 0, and the score of “HER2 amplification” was 0.2 or lower, the type was determined to be “luminal A (provisional).” Among “luminal A (provisional),” if the score of “cell cycle” was higher than 0, the type was determined to be “luminal B-HER2−,” and if the score of “cell cycle” was 0 or lower, the type was determined to be “luminal A.”

[0285] (5) If the score of “HER2+-like” had the highest score of the six scores and the score was higher than 0.2, and the score of “HER2 amplification” was higher than 0.2, the type was determined to be “HER2+.” If the score of “HER2+-like” was the highest and higher than 0.2, and the score of “HER2 amplification” was 0.2 or lower, the type was determined to be “HER2+-like.”

[0286] (6) If “phyllodes tumor” had the highest score of the six scores and the score was higher than 0.1, the type was determined to be “phyllodes tumor.”

[0287] (7) If “normal-like” had the highest score of the six scores and the score was higher than 0.1, the type was determined to be “normal-like.”

[0288] (8) Among the cases that did not belong to any of the above types based on each determination up to (7), for a case in which both the “cancer” and “cell cycle” scores were 0 or lower, the type was determined to be “normal-like.”

[0289] (9) For a case that did not belong to any of the above types based on each determination up to (8), the type was determined to be “undeterminable.”

[0290] (10) For a case in which the score of “squamous cell carcinoma” was 0.2 or higher, “squamous cell carcinoma” was also added to the subtype determination described above.

### Example 7

### Cluster Analysis Using Differentiation Marker Gene Set for Breast Cancer−2

[0291] In this example, a gene group obtained by selecting one gene from each of the 15 differentiating gene groups of the groups a to o selected in Example 3 was used as the differentiation marker gene set and, for the 470 cases with clear breast cancer subtypes, the expression levels of the 15 genes were measured (data not shown) and cluster analysis was conducted. Specifically, the genes of SPRR2A from the group a, SERPINH1 from the group b, FN1 from the group c, CAVIN2 from the group d, KRT15 from the group e, GABRP from the group f, EN1 from the group g, LYZ from the group f, CLCA2 from the group i, GRB7 from the group j, ORMDL3 from the group k, CYP2B6 from the group 1, ESR1 from the group m, FOXA1 from the group n, and CDC20 from the group o were each selected, and the subtype differentiation scores were calculated. Further, the cluster analysis was performed using Expression View Pro software (MicroDiagnostic) by the group-average method based on Euclidean distance, similar to Example 4. The results of cluster analysis are shown in FIG. 4. As shown in FIG. 4, when hierarchical cluster analysis was performed on the basis of the expression profiles of the genes obtained by selecting one gene from each of the 15 differentiating gene groups of the groups a to o, the genes could be classified into the cluster of a normal-like group, an undeterminable group, a normal group, a luminal A group, a HER2+-like group, a luminal B group, a HER2+ group, a triple negative group, and an other group.

### Example 8

### Histological Type Differentiation of Breast Cancer by Subtype Differentiation Score−2

[0292] FIG. 4 shows the results of calculating each subtype differentiation score from the expression level of each gene in the 470 cases with clear breast cancer subtypes by the same method as in Example 5 by using the differentiation marker gene set used in Example 7. It should be noted that the calculation of the scores was performed as follows.

[0293] The subtype differentiation scores (cancer score, cell cycle score, squamous cell score, phyllodes tumor score, normal-like score, triple negative score, HER2-like score, HER2 amplification score, and hormone sensitivity score) were calculated using the average value of each gene group obtained in each case. Specifically, each subtype differentiation score was calculated as follows. The maximum value of each subtype differentiation score was 1, the minimum value was −1, and a higher score indicates a higher likelihood.

[0294] Cancer score=(c×1.3−d×27.4)÷28.7

[0295] Cell cycle score=o

[0296] Squamous cell score=a

[0297] Phyllodes tumor score=b

[0298] Normal-like score=e

[0299] Triple negative score=(f×3.0+g×1.2+h×0.7−n×2.1)÷7

[0300] HER2-like score=i

[0301] HER2 amplification score=(j×2.5+k×1)÷3.5

[0302] Hormone sensitivity score=(1×1.1+m×1.9)÷3

[0303] FIG. 4 shows the scoring heat map (FIG. 2) obtained in Example 5 for comparison and, as shown in FIG. 4, even in a case in which one gene was selected from each of the 15 differentiating gene groups of the groups a to o to form the differentiation marker gene set, the subtype of breast cancer could be differentiated or classified by calculating the subtype differentiation score.

### Example 9

### Cluster Analysis Using Differentiation Marker Gene Set for Breast Cancer−3

[0304] The gene expression level of each gene was measured using a set of 153 kinds of genes belonging to the group f, the group g, the group i, the group j, the group k, the group 1, the group m, the group n, and the group o as the differentiation marker gene set (data not shown), gene expression levels of each gene (eight kinds) in the control group were measured (data not shown), and cluster analysis was conducted upon combining these. Further, cluster analysis was performed by the group-average method based on Euclidean distance using Expression View Pro software (MicroDiagnostic). The results of cluster analysis are shown in FIG. 5.As shown in FIG. 5, when hierarchical cluster analysis was performed on the basis of the expression profiles of the extracted 161 genes, the genes could be classified into the cluster of a luminal A and B group, a HER2+-like group, a HER2+ group, a triple negative group, and an other group.

### Example 10

### Histological Type Differentiation of Breast Cancer by Subtype Differentiation Score−3

[0305] FIG. 6 shows the results of calculating each subtype differentiation score from the expression level of each gene in the 470 cases with clear breast cancer subtypes by the same method as in Example 5 by using the differentiation marker gene set used in Example 9. Each subtype differentiation score was calculated as follows. It should be noted that the calculation of the scores was performed as follows.

[0306] The subtype differentiation scores (cancer score, cell cycle score, squamous cell score, phyllodes tumor score, normal-like score, triple negative score, HER2-like score, HER2 amplification score, and hormone sensitivity score) were calculated using the average value of each gene group obtained in each case. Specifically, each subtype differentiation score was calculated as follows. The maximum value of each subtype differentiation score was 1, the minimum value was −1, and a higher score indicates a higher likelihood.

[0307] Cell cycle score=o

[0308] Triple negative score=(f×1.5+g×7.1−n×5.9)÷14.5

[0309] HER2+-like score =i

[0310] HER2 amplification score=(j×6.5+k×1.8)÷8.3

[0311] Hormone sensitivity score=(1×7.20+m×0.15)÷7.35

[0312] On the basis of the obtained subtype differentiation scores, the histological type of breast cancer was differentiated as follows.

[0313] (1) The highest score of the scores of “triple negative score,” “HER2+-like score,” “HER2 amplification score,” and “hormone sensitivity score” was found.

[0314] (2) Among cases having a “triple negative score” that was the highest score of the four scores and a score higher than 0.2, a case with a “cell cycle score” higher than −0.6 was determined to be “triple negative” and a case with a “cell cycle score” of −0.6 or lower was determined to be “normal.”

[0315] (3) Among cases having an “HER2 amplification score” that was the highest score of the four scores and a score higher than 0.2, a case with a “hormone sensitivity score” higher than 0 was determined to be “luminal B-HER2+” and a case with a “hormone sensitivity score” of 0 or lower was determined to be “HER2+.”

[0316] (4) Among cases having a “hormone sensitivity score” that was the highest score of the four scores and a score higher than 0, a case with a “HER2 amplification score” higher than 0.2 was determined to be “luminal B-HER2+.” In addition, among cases having a “hormone sensitivity score” that was the highest score and a score higher than 0, and further having a “HER2 amplification score” of 0.2 or lower, a case with a “cell cycle score” higher than 0 was determined to be “luminal B-HER2-” and a case with a “cell cycle score” of 0 or lower was determined to be “luminal A.”

[0317] (5) A case having an “HER2+-like score” that was the highest score of the four scores and a score higher than 0.2, and further having a “HER2 amplification score” higher than 0.2 was determined to be “HER2+.”

[0318] (6) A case having a “HER2+-like score” that was the highest score of the four scores and a score of 0.2 or higher, and further having a “HER2 amplification score” of 0.2 or lower was determined to be “HER2+-like.”

[0319] (7) A case that did not belong to any of the above types based on each determination up to (6) was determined to be “undeterminable group.”

[0320] As a result, breast cancer subtypes could be differentiated or classified into the luminal A and B group, the HER2+-like group, the HER2+ group, the triple negative group, and the undeterminable group. It should be noted that, when the results were compared with the results of each subtype differentiation score calculated in the same manner by using the differentiation marker gene set of 199 genes included in the groups a to o, the differentiation or classification of the subtypes of breast cancer into the luminal A and B group, the HER2+-like group, the HER2+ group, the triple negative group, or the undeterminable group was of similar accuracy.

[0321] Further, the histological type of breast cancer was differentiated using the subtype differentiation score, making it possible to further distinguish, among the luminal A and B group, the luminal A group, the luminal B group (HER2 positive), and the luminal B group (HER2 negative).

[0322] [Sequence table] MDCP1801 Seq listing_190304_ST25.txt

What is claimed is:

1. A method of differentiating or classifying a subtype of breast cancer in a test sample, the method comprising:
(a) a step of measuring, in the test sample, expression levels of genes included in a differentiation marker gene set for differentiating or classifying a subtype of breast cancer; and
(b) a step of differentiating or classifying whether the test sample is a desired subtype to be differentiated or classified from the expression levels of the genes included in the differentiation marker gene set thus measured,
the differentiation marker gene set including a combination of genes obtained by selecting at least one gene from each gene group of at least one gene group selected from gene groups composed of groups a to o shown in the tables below, and
the at least one gene group being selected in accordance with the desired subtype to be differentiated or classified.
TABLE 1A

| Gene group | Gene symbol |
|---|---|
| Group a | KRTDAP |
| | SERPINB3 |
| | SPRR2A |
| | SPRR1B |
| | KLK13 |
| | KRT1 |
| | LGALS7 |
| | PI3 |
| Group b | SERPINH1 |
| | SNAI2 |
| | GPR173 |
| | HAS2 |
| | PTH1R |
| | PAGE5 |
| | ITLN1 |
| | SH3PXD2B |
| Group c | TAP1 |
| | FN1 |
| | CTHRC1 |
| | MMP9 |
| Group d | ADIPOQ |
| | CD36 |
| | G0S2 |
| | GPD1 |
| | LEP |
| | LIPE |
| | PLIN1 |
| | CAVIN2 |
| | LIFR |
| | TGFBR3 |
| e [symbol] | CAPN6 |
| | PIGR |
| | KRT15 |
| | KRT5 |
| Group e | KRT14 |
| | DST |
| | WIF1 |
| | SYNM |
| | KIT |
| Group f | GABRP |
| | SFRP1 |
| | ELF5 |
| | MIA |
| | MMP7 |
| | FDCSP |
| Group g | CRABP1 |
| | PROM1 |
| | KRT23 |
| | S100A1 |
| | WIPF3 |
| | CYYR1 |
| | TFCP2L1 |
| | DSC2 |
| | MPGE8 |
| | KLK7 |
| | KLK5 |
| | DSG3 |
| | TTYH1 |
| | SCRG1 |
| | S100B |
| | ETV6 |
| | OGFRL1 |
| | MELTF |
| | HORMAD1 |
| | PKP1 |
| | FOXC1 |
| | ITGB8 |
| | VGLL1 |
| | ART3 |
| | EN1 |
| | SPHK1 |
| | TRIM47 |
| | COL27A1 |
| | RFLNA |
| | RASD2 |
| | A2ML1 |
| | MARCO |
| | TSPYL5 |
| | TM4SF1 |
| | FABP5 |
| Group h | SPIB |
| | BCL2A1 |
| | MZB1 |
| | KCNK5 |
| | LMO4 |
| | RNF150 |
| | LYZ |
| Group i | C21orf58 |
| | ATP13A5 |
| | NUDT8 |
| | HSD17B2 |
| | ABCA12 |
| | ENPP3 |
| | WNT5A |
| | MPP3 |
| | VPS13D |
| | PXMP4 |
| | GGT1 |
| | TRPV6 |
| | MAB21L4 |
| | CLDN8 |
| | LBP |

TABLE 1B

| Gene group | Gene symbol |
|---|---|
| Group i | SRD5A3 |
| | PAPSS2 |
| | TMEM45B |
| | CLCA2 |
| | FASN |
| | MPHOSPH6 |
| | NXPH4 |
| | HPGD |
| | KYNU |
| | GLYATL2 |
| | KMO |
| | SRPK3 |
| | THRSP |
| | PLA2G2A |
| | TFAP2B |
| | FABP7 |
| | SLPI |
| | SERHL2 |
| | S100A9 |
| | KRT7 |
| | TMEM86A |
| | MBOAT1 |
| Group j | PGAP3 |
| | STARD3 |
| | ERBB2 |
| | MIEN1 |
| | GRB7 |
| Group k | GSDMB |
| | ORMDL3 |
| | MED24 |
| | MSL1 |
| | CASC3 |
| | WIPF2 |
| Group l | THSD4 |
| | MAPT |
| | LONRF2 |
| | TCEAL3 |
| | DBNDD2 |
| | FGD3 |
| | GFRA1 |
| | PARD6B |
| | STC2 |
| | SLC39A6 |
| | ENPP5 |
| | ZNF703 |
| | EVL |
| | TBC1D9 |
| | CHAD |
| | GREB1 |
| | HPN |
| | IL6ST |
| | GASK1B |
| | CA12 |
| | KCNE4 |
| | NAT1 |
| | CYP2B6 (CYP2B7P) |
| | ARMT1 |
| | MAGED2 |
| | CELSR1 |
| | INPP5J |
| | PADI2 |
| | PPP1R1B |
| Group m | ESR1 |
| Group n | MLPH |
| | FOXA1 |
| | XBP1 |
| | GATA3 |
| | ZG16B |
| | KIAA0040 |
| | TMC4 |
| | AGR2 |
| | TFF3 |
| | SCGB2A2 |
| | MUCL1 |
| Group o | DDX11 |
| | ATAD2 |
| | GGH |
| | CDCA3 |
| | CCNA2 |
| | CCNB2 |
| | ANLN |
| | UBE2C |
| | CKS2 |
| | MKI67 |
| | FOXM1 |
| | UBE2T |
| | MCM4 |
| | CKAP2 |
| | JPT1 |
| | KPNA2 |
| | H2AFX |
| | H2AFZ |
| | CDK1 |
| | PTTG1 |
| | CDC20 |
| | MYBL2 |
| | RRM2 |

2. The method of differentiating or classifying according to claim 1, wherein
the step (b) is a step of differentiating or classifying a subtype of the test sample by acquiring an expression profile of the differentiation marker gene set from the expression levels of the genes thus measured, and comparing the expression profile thus acquired and an expression profile of a corresponding differentiation marker gene set in a sample derived from a breast cancer patient having the desired subtype to be differentiated or classified.

3. The method of differentiating or classifying according to claim 2, wherein
in the step (b), the expression profile thus acquired and the expression profile of a corresponding differentiation marker gene set in the sample derived from a breast cancer patient having the desired subtype to be differentiated or classified are compared, and
the test sample is evaluated as being breast cancer of the subtype thus compared when having an expression profile equivalent to the expression profile of the sample thus compared, or is evaluated as not being breast cancer of the subtype thus compared when having an expression profile of genes different from the expression profile of the sample thus compared.

4. The method of differentiating or classifying according to claim 2, wherein
comparison with the expression profile of the corresponding differentiation marker gene set in the sample derived from a breast cancer patient having the desired subtype to be differentiated or classified in the step (b) is performed by cluster analysis.

5. The method of differentiating or classifying according to claim 2, wherein
in the step (b), the differentiating or classifying is performed by comparing the expression profile thus acquired with a predetermined threshold value.

6. The method of differentiating or classifying according to claim 2, wherein
the step (b) is a step of differentiating or classifying whether the test sample is the desired subtype to be differentiated by calculating a subtype differentiation score from the expression levels of the genes included in the gene set thus measured.

7. The method of differentiating or classifying according to claim 6, wherein
the subtype differentiation score in the step (b) is determined on the basis of the expression levels of genes included in each gene group selected in accordance with the desired subtype to be differentiated, or an average value thereof

8. The method of differentiating or classifying according to claim 1, wherein
the desired subtype is a subtype selected from a group composed of luminal A, luminal B (HER2 positive), luminal B (HER2 negative), HER2 positive, HER2 positive-like, triple negative, phyllodes tumor, squamous cell carcinoma, normal-like, normal, and undeterminable.

9. The method of differentiating or classifying according to claim 1, wherein
the at least one gene group selected in accordance with the desired subtype to be differentiated in the step (a) is
(i) the group 1 and the group m for calculating a hormone sensitivity score, the group o for calculating a cell cycle score, and the group j and the group k for calculating a HER2 amplification score when the desired subtype is luminal A,
(ii) the group j and the group k for calculating the HER2 amplification score, and the group 1 and the group m for calculating the hormone sensitivity score when the desired subtype is luminal B (HER2 positive),
(iii) the group j and the group k for calculating the HER2 amplification score, the group 1 and the group m for calculating the hormone sensitivity score, and the group o for calculating the cell cycle score when the desired subtype is luminal B (HER2 negative),
(iv) the group j and the group k for calculating the HER2 amplification score, the group 1 and the group m for calculating the hormone sensitivity score, or the group i for calculating a HER2-like score when the desired subtype is HER2 positive,
(v) the group i for calculating the HER2-like score, and the group j and the group k for calculating the HER2 amplification score when the desired subtype is HER2 positive-like,
(vi) the group f, the group g, the group h, and the group n for calculating a triple negative score when the desired subtype is triple negative,
(vii) the group b for calculating a phyllodes tumor score when the desired subtype is phyllodes tumor,
(viii) the group a for calculating a squamous cell score when the desired subtype is squamous cell carcinoma,
(ix) the group a to the group o for calculating a cancer score and all other scores when the desired subtype is undeterminable,
(x) the group e for calculating a normal-like score, the group o for calculating the cell cycle score, and the group c and the group d for calculating the cancer score when the desired subtype is normal-like, or
(xi) the group c and the group d for calculating the cancer score when the desired subtype is normal.

10. The method of differentiating or classifying according to claim 1, wherein
the desired subtypes are luminal A and B, HER2 positive-like, HER2 positive, and triple negative, and
the differentiation marker gene set includes a combination of genes obtained by selecting at least one gene from each gene group of the group f, the group g, the group i, the group j, the group k, the group 1, the group m, the group n, and the group o.

11. The method of differentiating or classifying according to claim 1, wherein
the differentiation marker gene set includes all genes included in each gene group of a plurality of the gene groups thus selected.

12. The method of differentiating or classifying according to claim 1, wherein
the differentiation marker gene set further includes at least one gene selected from a control group composed of ABCF3, FBXW5, MLLT1, FAM234A, PITPNM1, WDR1, NDUFS7, and AP2A1.

13. A differentiation marker gene set for differentiating or classifying a subtype of breast cancer, the differentiation marker gene set comprising:
a combination of genes obtained by selecting at least one gene from each gene group of at least one gene group selected from gene groups composed of groups a to o shown in the tables below,
the at least one gene group being selected in accordance with a desired subtype to be differentiated or classified.
TABLE 2A

| Gene group | Gene symbol |
|---|---|
| Group a | KRTDAP |
| | SERPINB3 |
| | SPRR2A |
| | SPRR1B |
| | KLK13 |
| | KRT1 |
| | LGALS7 |
| | PI3 |
| Group b | SERPINH1 |
| | SNAI2 |
| | GPR173 |
| | HAS2 |
| | PTH1R |
| | PAGE5 |
| | ITLN1 |
| | SH3PXD2B |
| Group c | TAP1 |
| | FN1 |
| | CTHRC1 |
| | MMP9 |
| Group d | ADIPOQ |
| | CD36 |
| | GOS2 |
| | GPD1 |
| | LEP |
| | LIPE |
| | PLIN1 |
| | CAVIN2 |
| | LIFR |
| | TGFBR3 |
| Group e | CAPN6 |
| | PIGR |
| | KRT15 |
| | KRT5 |
| | KRT14 |
| | DST |
| | WIF1 |
| | SYNM |
| | KIT |
| Group f | GABRP |
| | SFRP1 |
| | ELF5 |
| | MIA |
| | MMP7 |
| | FDCSP |
| Group g | CRABP1 |
| | PROM1 |
| | KRT23 |
| | S100A1 |
| | WIPF3 |
| | CYYR1 |
| | TFCP2L1 |
| | DSC2 |
| | MFGE8 |
| | KLK7 |
| | KLK5 |
| | DSG3 |
| | TTYH1 |
| | SCRG1 |
| | S100B |
| | ETV6 |
| | OGFRL1 |
| | MELTF |
| | HORMAD1 |
| | PKP1 |
| | FOXC1 |
| | ITGB8 |
| | VGLL1 |
| | ART3 |
| | EN1 |
| | SPHK1 |
| | TRIM47 |
| | COL27A1 |
| | RFLNA |
| | RASD2 |
| | A2ML1 |
| | MARCO |
| | TSPYL5 |
| | TMASF1 |
| | FABP5 |
| Group h | SPIB |
| | BCL2A1 |
| | MZB1 |
| | KCNK5 |
| | LM04 |
| | RNF150 |
| | LYZ |
| Group i | C21orf58 |
| | ATP13A5 |
| | NUDT8 |
| | HSD17B2 |
| | ABCA12 |
| | ENPP3 |
| | WNT5A |
| | MPP3 |
| | VPS13D |
| | PXMP4 |
| | GGT1 |
| | TRPV6 |
| | MAB21L4 |
| | CLDN8 |
| | LBP |

TABLE 2B

| Gene group | Gene symbol |
|---|---|
| Group i | SRD5A3 |
| | PAPSS2 |
| | TMEM45B |
| | CLCA2 |
| | FASN |
| | MPHOSPH6 |
| | NXPH4 |
| | HPGD |
| | KYNU |
| | GLYATL2 |
| | KMO |
| | SRPK3 |
| | THRSP |
| | PLA2G2A |
| | TFAP2B |
| | FABP7 |
| | SLPI |
| | SERHL2 |
| | S100A9 |
| | KRT7 |
| | TMEM86A |
| | MBOAT1 |
| Group j | PGAP3 |
| | STARD3 |
| | ERBB2 |
| | MIEN1 |
| | GRB7 |
| Group k | GSDMB |
| | ORMDL3 |
| | MED24 |
| | MSL1 |
| | CASC3 |
| | WIPF2 |
| Group l | THSD4 |
| | MAPT |
| | LONRF2 |
| | TCEAL3 |
| | DBNDD2 |
| | FGD3 |
| | GFRA1 |
| | PARD6B |
| | STC2 |
| | SLC39A6 |
| | ENPP5 |
| | ZNF703 |
| | EVL |
| | TBC1D9 |
| | CHAD |
| | GREB1 |
| | HPN |
| | IL6ST |
| | GASK1B |
| | CA12 |
| | KCNE4 |
| | NAT1 |
| | CYP2B6 (CYP2B7P) |
| | ARMT1 |
| | MAGED2 |
| | CELSR1 |
| | INPP5J |
| | PADI2 |
| | PPP1R1B |
| Group m | ESR1 |
| Group n | MLPH |
| | FOXA1 |
| | XBP1 |
| | GATA3 |
| | ZG16B |
| | KIAA0040 |
| | TMC4 |
| | AGR2 |
| | TFF3 |
| | SCGB2A2 |
| | MUCL1 |
| Group o | DDX11 |
| | ATAD2 |
| | GGH |
| | CDCA3 |
| | CCNA2 |
| | CCNB2 |
| | ANLN |
| | UBE2C |
| | CKS2 |
| | MKI67 |
| | FOXM1 |
| | UBE2T |
| | MCM4 |
| | CKAP2 |
| | JPT1 |
| | KPNA2 |
| | H2AFX |
| | H2AFZ |
| | CDK1 |
| | PTTG1 |
| | CDC20 |
| | MYBL2 |
| | RRM2 |

14. The differentiation marker gene set according to claim 13, wherein
the desired subtype is a subtype selected from a group composed of luminal A, luminal B (HER2 positive), luminal B (HER2 negative), HER2 positive, HER2 positive-like, triple negative, phyllodes tumor, squamous cell carcinoma, normal-like, normal, and undeterminable.

15. The differentiation marker gene set according to claim 13, wherein
the at least one gene group is
(i) the group 1 and the group m for calculating a hormone sensitivity score, the group o for calculating a cell cycle score, and the group j and the group k for calculating a HER2 amplification score when the desired subtype is luminal A,
(ii) the group j and the group k for calculating the HER2 amplification score, and the group 1 and the group m for calculating the hormone sensitivity score when the desired subtype is luminal B (HER2 positive),
(iii) the group j and the group k for calculating the HER2 amplification score, the group 1 and the group m for calculating the hormone sensitivity score, and the group o for calculating the cell cycle score when the desired subtype is luminal B (HER2 negative),
(iv) the group j and the group k for calculating the HER2 amplification score, the group 1 and the group m for calculating the hormone sensitivity score, or the group i for calculating a HER2-like score when the desired subtype is HER2 positive,
(v) the group i for calculating a HER2-like score, and the group j and the group k for calculating the HER2 amplification score when the desired subtype is HER2 positive-like,
(vi) the group f, the group g, the group h, and the group n for calculating a triple negative score when the desired subtype is triple negative,
(vii) the group b for calculating a phyllodes tumor score when the desired subtype is phyllodes tumor,
(viii) the group a for calculating a squamous cell score when the desired subtype is squamous cell carcinoma,
(ix) the group a to the group o for calculating a cancer score and all other scores when the desired subtype is undeterminable,
(x) the group e for calculating a normal-like score, the group o for calculating the cell cycle score, and the group c and the group d for calculating the cancer score when the desired subtype is normal-like, or
(xi) the group c and the group d for calculating the cancer score when the desired subtype is normal.

16. The differentiation marker gene set according to claim 13, the differentiation marker gene set comprising:
a combination of genes obtained by selecting at least one gene from each gene group of nine gene groups composed of the group f, the group g, the group i, the group j, the group k, the group 1, the group m, the group n, and the group o.

17. The differentiation marker gene set according to claim 13, the differentiation marker gene set comprising:
a combination of genes obtained by selecting at least one gene from each gene group of 15 gene groups composed of the groups a to o.

18. The differentiation marker gene set according to claim 13, the differentiation marker gene set further comprising:
at least one gene selected from a control group composed of ABCF3, FBXWS, MLLT1, FAM234A, PITPNM1, WDR1, NDUFS7, and AP2A1.

19. A kit for differentiating or classifying a subtype of breast cancer in a test sample, the kit comprising:
means for measuring expression levels of genes included in the differentiation marker gene set for differentiating or classifying a subtype of breast cancer described in claim 13.

20. The kit according to claim 19, wherein
the means for measuring expression levels of genes is at least one means selected from a group composed of a primer or a probe for the genes or markers thereof.

21. The kit according to claim 20, wherein
the kit is for a PCR, a microarray, or an RNA sequence.

The application's sequence listing, which the Patent Office published only in electronic form, follows.

SEQUENCE LISTING (414 sequences)

SEQ ID NO: 1 - DNA, 2362 bp, Homo sapiens
ctcggccatcgatgcctcggggctcgtggcgtcgggcctggcgggctccccgttgggcgggggcggcggtccgagcggctgcggcagcggaagcgggtccgggtcgcgcagggcgggggcggcgcagcgggcggaggcggccgtgggccgcctgggcagaatgtcacgatggacgagggcggcacgcccctgctccccgacagcctggtctaccagatcttcctgagcctgggcccggccgacgtgctggccgccgggctggtgtgccgccaatggcaggccgtgtcgcgggacgagttcctgtggagggagcagttctaccgctactaccaggtggcccgcgacgtgccccgacacccagcggccatgtcctggtacgaggagttccagcggctgtatgacacggtgccctgcgtggaggtgcagacgctgcgggaacacacagaccaggtcctgcacctcagcttctcccattccgggtaccagttcgcgtcctgctccaaggactgcactgtgaagatctggagcaacgacctgaccatctcgctgctgcacagcgcggacatgcggccctacaactggagctacacccagttctcccagttcaacaaggacgactcgctactgctggcctcgggggtgttcctggggccgcacaactcctcatccggcgagattgctgtcatcagcctagactccttcgcgctgctgtcccgcgtgcggaacaagccctatgacgtgtttggctgttggctcaccgagaccagcctcatctcggggaacctgcaccgcatcggagatatcacctcctgctcggtgctgtggctcaacaatgccttccaggatgtggagtcagagaacgtcaacgtggtgaagcggctgttcaagatccagaacctcaatgccagcaccgtccgcacggtgatggtggccgactgcagccgcttcgacagccctgacctgctgctggaagccggtgacccggccacgtccccctgccgcatctttgacctgggcagcgacaacgaggaggtggtggctggcccggcccccgcccacgccaaggagggcttgcggcactttctggaccgcgtgctggaggggcgggcgcagccacagctgtcggagcgcatgctagagaccaaggtggccgagctgctggcccagggccacaccaagccacccgagcgcagtgccacaggcgccaagagcaagtacctcatcttcaccactggctgcctcacctactccccacaccagatcggcatcaagcagatcctgccacaccagatgaccacggcagggcccgtgctgggtgagggccggggctccgatgccttcttcgacgcgctggaccacgtcatagacatacacggacacatcatcggcatgggcctgtcgcccgacaacaggtacctgtacgtgaacagccgcgcctggcccaacggtgcggtggtggccgaccccatgcagccgccaccaatcgcggaggagattgacctgctggtgttcgacctcaagaccatgcgggaggtgaggcgggctctgcgtgcgcaccgcgcctacacgcccaacgacgagtgcttcttcatcttcctggacgtcagcagggacttcgtggccagcggggcggaggaccggcacggctacatctgggaccgccactacaacatctgtctggccaggctgcggcacgaggatgtggtcaactcagtggtcttcagtccccaggagcaggagctgctgctcacggccagcgacgacgccaccatcaaagcctggcgctccccacgcaccatgcgcgtcctccaggcacctcgcccacggcctcgcaccttcttctcctggcttgccagccagaggcgctgaggtgtgctgggtgcactggagccaccgggaccccttgaggacatcgccaggctctgtggctttttcccgagcgggagaggtggagatgcttatagcagttacgccttaggaaggggacaaccaggccccgccacacgctcacacacaaacctgctcacgcagctgtgatgcttggcacggggtggccagtgcagatggagcccaaggccccctcggcctcctgggcaacttggggtacacaggatactgggggtgccgctcctcactcaaccccaggctaggggtacacctgacccagctggcctcggcccggggcaccttcggctggtcctgtggggccctggacggtggcccagtggtggcaggggctgctcctggctgtggttgtgcgcccggggcttgggagcggccggtcacgctgctgtgggcccgagtgtgttgcatgtccacgcaccacccgttcagggccctgaataaacagttggcaacagca

SEQ ID NO: 2 - DNA, 4217 bp, Homo sapiens
aggggcgccggcgggcggatcgagaggaaggtcggggccatgggccggcactgcgcctcgggagggtccggccaccgctggaacccgaggccggggctgggggcgctccgggctccgacccacgggccggccggccctgcccgggctgggtgaggggcgcccgcctcaagctagaggaggagcggaggccgcgcgcggcccgccgagcgccttcaggatgctcatcaaggaataccacattctgctgcccatgagcctggacgagtaccaggtggcccagctctacatgatccagaaaaagagccgggaggagtctagtggtgagggcagcggcgtggagatcctggccaaccggccctacacggatgggcccgggggcagcgggcaatacacacacaaggtgtaccacgtgggctcccacatcccaggctggttccgggcactgctgcccaaggctgccctgcaggtagaagaggaatcctggaatgcctacccctacacccgaacccggtacacctgccctttcgtggagaaattctccattgaaattgagacctattacctgcctgatggggggcagcagccaaacgtcttcaacctgagcggggccgagaggagacagcgcatcctggacaccatcgacatcgtgcgggatgcagtggccccaggcgagtacaaagcagaagaggacccccggctttatcactcggtcaagacgggccgagggccactgtctgatgactgggcacggacggcggcacagacggggccccttatgtgtgcctataagctgtgcaaggttgagttccgctactggggcatgcaagccaagatcgagcagttcatccatgatgtaggtctgcgtcgggtgatgctgcgggcccaccgccaggcctggtgctggcaggatgagtggacagagctgagcatggctgacatccgggcactggaagaggagactgctcgcatgctggcccagcgcatggccaagtgcaacacaggcagtgaggggtccgaggcccagccccccgggaaaccgagcaccgaggcccggtctgcggccagcaacactggcacccccgatgggcctgaggcccccccaggcccagatgcctcccccgatgccagctttgggaagcagtggtcctcatcctcccgttcctcctactcatcccaacatggaggggctgtgtctccccagagcttgtctgagtggcgcatgcagaacattgcccgagactctgagaacagctccgaggaagagttctttgatgcccacgaaggcttctcggacagtgaggaggtcttccccaaggagatgaccaagtggaactccaatgacttcattgatgcctttgcctccccagtggaggcagagggaacgccagagcctggagccgaggcagctaaaggcattgaggatggggcccaagcacccagggactcagagggcctggatggagccggggagctgggggctgaggcatgcgcagtccacgccctcttccttatcctgcacagcggcaacatcctggactcaggccctggagacgccaactccaagcaggcggatgtgcagacgctgagctccgccttcgaggccgtcacccgcatccacttccctgaggccttgggccacgtggcgctgcgactggtgccctgtccacccatctgcgccgccgcctatgcccttgtctccaacctgagcccttacagccacgatggggacagcctgtctcgctcccaagaccacattccactggctgccctgccactgctggccacctcatcctcccgctaccagggcgccgtggccaccgtcattgcccgcaccaaccaggcctactcagccttcctgcgctcacctgagggtgccggcttctgtgggcaggtcgcactgattggagatggtgttggtggcatcctgggctttgatgcactctgccacagtgctaacgcgggcaccgggagtcggggcagcagccgccgtgggagcatgaacaatgagctgctctctccggagtttggcccagtgcgggaccccctggcagatggtgtggaaggcctgggtcggggcagcccagaaccctcggccttgcctccccagcgcatccccagcgacatggccagtcctgagcccgagggctctcagaacagccttcaggcagcccccgcaaccacctcctcctgggagccccggcgggcaagcacggccttctgcccacccgctgccagttccgaggcacctgacggccccagcagcactgcccgccttgacttcaaggtctctggcttcttcctcttcggctccccactgggcctggtgctggctctgcgcaaaactgtgatgcccgccctggaggcagcccagatgcgcccagcctgtgaacagatctacaacctcttccacgcggctgacccctgcgcctcacgcctcgagcccctgctggccccgaagttccaggccatcgccccactgaccgtgccccgctaccagaagttccccctgggagatggctcatccctgctgctggccgacactctgcagacgcactccagcctctttctggaggagctggagatgctggtgccctcaacacccacctctactagcggtgccttctggaagggcagtgagttggccactgaccccccggcccagccagccgcccccagcaccaccagtgaggtggttaagatcctggagcgctggtgggggaccaagcggatcgactactcgctgtactgccccgaggcgctcaccgcctttcccaccgtcacgctgccccacctcttccacgccagctactgggagtccgccgacgtggtggcgttcatcctgcgccaggtgatcgagaaggagcggccacagctggcggaatgcgaggagccgtccatctacagcccggccttccccagggagaagtggcagcgaaaacgcacgcaggtcaagatccggaacgtcacttccaaccaccgggcgagcgacacggtggtgtgcgagggccgcccccaggtgctaagcgggcgcttcatgtacgggcccctggacgtcgtcacgctcactggagagaaggtggatgtctacatcatgacgcagccgctgtcgggcaagtggatccactttggcaccgaagtcaccaatagctcgggccgcctcaccttcccagttcccccagaacgcgcgctgggcattggtgtctaccccgtgcgcatggtggtcaggggcgaccacacctatgccgaatgctgcctgactgtggtggcccgcggcacggaggctgtggtcttcagcatcgacggctccttcaccgccagcgtctccatcatgggcagcgaccccaaggtgcgagctggcgccgtggacgtggtcaggcactggcaggactccggctacctgatcgtgtatgtcacaggccggccggatatgcagaagcaccgcgtggtggcatggctgtcgcagcacaacttcccccacggcgtcgtctccttctgcgacggcctcacccacgacccactacgccagaaggcaatgtttctgcagagcctggtgcaggaggtagaactgaacatcgtggccggttatgggtctcccaaagatgtggctgtatacgcggcgctggggctgtccccgagccagacctacatcgtgggccgtgccgtgcggaagctacaggcgcagtgccagttcctgtcagacggctatgtggcccacctgggccagctggaagcgggctcgcactcgcatgcctcctcgggacccccgagagctgccttgggcaagagcagctatggtgtggctgcccccgtggacttcctgcgcaaacagagccagctgcttcgctcgaggggccccagccaggcggagcgtgagggcccgggaacaccacccaccaccctggcacggggcaaagcacggagcatcagcctgaagctggacagcgaggagtgaggcccacaccagcctggacctgggttatttattgacacacccaaggggcccgaggggctgcgtgtgggaggctggggacccagacttttggccccagcgctggcccccccagccccacaccctatatctccgtgtgctcctcggtgttacttccctttcatatgaggggacccagcgccggggggagggaggagggcgtgggcatgggcgcagaggcttttccagtgtgtataaatccatgaaaataaacgccacctgcacccca

SEQ ID NO: 3 - DNA, 4532 bp, Homo sapiens
gcgcgacccgggctggcggtggtttccggttccgcggggctggcgggcgagcgggcggccgggatcggcggcggcggcggcggcggcggcgcttgacagacaatgagggcggcggggcggcgttgagcggcggcggcggcggcggcggcggcgagcgacgcggggcccgggggcggggcggggcgccagccatggacaatcagtgcaccgtccaggtgaggttagagctggggcatcgcgcccaactgcgcaagaagcccaccacggaggggttcactcacgactggatggtgtttgtccgcggccccgagcaatgtgacatccagcacttcgtggagaaggtggtcttctggctgcacgacagcttccccaagcccagacgcgtgtgcaaggagcccccctacaaagtagaggagtcggggtacgctggcttcatcatgcccatcgaggtgcacttcaaaaacaaggaggagccgaggaaggtctgcttcacctacgacctgttcctgaacctggaaggcaacccgcccgtgaaccacctgcgctgcgagaagctcaccttcaacaaccccaccacggagttccggtacaagctcctgcgggccggcggggtgatggtaatgcccgaaggagcagacacggtgtccaggcccagtcccgactaccccatgttacccacaattccactctctgccttctctgaccccaagaagaccaaaccatcccacggctccaaggacgccaacaaggagagcagcaagacctccaagccacacaaggtgaccaaggagcaccgggagcggccccgcaaagactccgagagcaagagctcctccaaggagctggagcgtgagcaggccaaaagctccaaggacacctcgcggaagctgggcgagggccggctgcccaaggaggagaaggcgccaccgcccaaggctgccttcaaggaacccaagatggccctgaaagagaccaagctggaaagcacgtcccccaagggtgggcccccacccccacccccacccccaccccgggcttccagcaagcggccggccaccgccgactcgccaaagcccagcgccaagaagcagaagaagagcagctcgaaggggtcccggagtgctccaggcacctcgccccgcacctcctcctcctcctccttctcggacaagaagccggccaaggacaagagcagcaccagaggggagaaggtgaaggccgagagtgagccccgggaggccaaaaaggccctggaggtggaggagtccaactcagaggacgaggcctccttcaagtccgagtctgcccagtcaagcccgtccaactccagctccagctcagactccagctcagactcagacttcgagccatcccagaaccacagccaaggacccctgcgctccatggtggaggacctgcagtccgaggagtccgacgaggacgactcttcgtcaggcgaggaggctgccggcaagaccaacccggggagggactccaggttgagcttcagcgacagcgagagtgacaacagcgccgactcctccctgcccagccgtgagcccccacccccccagaagccacccccgcccaacagcaaggtgtcaggccggaggagccccgagtcctgcagcaagcctgagaagatcctcaagaagggcacctacgacaaggcctacacggatgagctggtggagctacaccggaggctgatggcgctgcgggagcgcaacgtgctgcagcagattgtgaatctgatcgaggagactggccacttcaatgtcaccaacaccaccttcgacttcgacctcttctccctggacgagaccaccgtgcgcaaactgcagagctgcctggaggccgtggccacatgaccctgggccgcgtgccgggcccccaccgccggggtcctgggaggctgcagccaggcctcgcctgccctcctctcccgtctcgcctgcccgcagcactgccttagcgacagccctgtcctcgcccgcacagcccgctgcactttcctcggcggctccctgcccactctccccgctccatcgccaggagccctggggccgggctgggccacacgggagccgccccccgggctctctgggctcccctcagagagcggctggtgttgaaggcagctctgggcagagacagggccgggggcccctcgcccagccttgggaccagcccccactgctcggcgggctgtgcggcgtcgctgccccagcctttctgagcagcggatcgacggctggggggcatctccagcctcccgaatggttcagaacacaccctccgcccaccctggacctcagaaggccctgcctgtgtgtctgcgtcgtcctccgtgtagacctagcgccggctcctccccggctcgcgctgcgctggggtctgtgctgtatagttctctctattatatatgtgtgtgcactgtctggtcaagagcagtgtccatgtgcgtttctgtggcagcagtgcacgtggggtgggtggggggtgcgtacggtggggcttgtaggttaagatgtctctgcggtggtgtggggctggaggccgagccaggcacggcagctggccctctccaggcgcatggaggaattctccctttgccgttccaaggatgccgccgcctcctaccggggctcccgggggggtcagccaacactacaaagggcagcgagtcctcagggcgcccgggagccaccagtctgctctcgggctctactcagactagcgccaacagtctccgcggacagactcgcatcagccgccctggggctcggcctcctcccataggctcctcttcctctctttcattcaagtcttcaaactttgaaaaaaatatgagcttttgccaaataagacgggatagtttatggagttttctgaggcgcattgaactctggtcagcccctcgagcgtgggctcggccatcagcaggcccggtgggttggccgggctggccctcccaggctgcctttctctctggtcgcggcctggcccgccccggcctccaccgccgcaattcatgctggtgccgcgcccgcagccccactcctggtatgcctgagattctccaggggccaagccggtcctccttcccggcccactcttccagggccaggacgctcccgcggagccagcccatcgtggctgggggtcccaggggctggaggcctgcctggttagcctctgtttcccagacattgactcgaggcgcctccagtcctctcaaccccctgactttcaagtcctttcaagtccttgtgccctgaccaagttatgaggaaaagagggctgagggcctggaggtgggctcgcaccccctcgaacccacctagatgtctcctcctccccagcctatgagttcagacttggggggctccatctgtccctccctgaggtccctcatcttgtccctgctctgattctgtcagcagatcctgaacactccttggtggggacccatgcctccaaggctgcccccaatgccagctgtcctggggaaactccccagaactctcggggaaaggcccgagaaccttcggaggaagcctccgggactcctcgccacctgctctgtttctctcccggccccactgccttcaggtatcaggaagagggcaggcccctgtgccccctctccccttcccagggcggccaacaatactccaccatggggcgcttcctttcttctctggaaactaagacattggactgaaggaactggcctgaggggggctgaccgggggcccgtgctgctgggagctctacgcacaagaggccgccggggtcacggacaggaacctcagcccagggtgctggcctttctccttcgcaggagtcccccaaaatccacacagcgactcgagcagccttccactcagccagaggagggtcgggctcccccgcctgctctcggtggtggcgtctggcccttcctgccgtttccaaggcctccggaagcaccaacccagttctcagttacctcctctggccggaaggcctcacgttgtcctccagagctgctctgggcccagggctggctccgtgaccacctgatggacgtgctgggcagcatgggctcccaaggcagcatccccagctgctctcccaccccaccccagctgcccggcggctgggcccacgagggctctggggacacttccataggaaaggggcctggcactttgtgattgccacgtgtttcctgttaagccgcctgcccccagtgcaaatctctgtgttttgctctctcctgaacaaaaatgtaaaccgacgccggaaagcaaatggtatcgaatacctttcttgcccataagggtttttacaaagaacgtgtctcactaggaactaggacactcatcggcccgagaccaactcctggataaaaggaataaggagaatcgtgtttgtaacgagttacaggattgtttctttcctggattttaaacttttgttaaattgtgaaattatggaggagttttatagaaaaaaaaagtgaaataaagtcagatgggaaagca

SEQ ID NO: 4 - DNA, 2993 bp, Homo sapiens
actccactcccggcacgcccggtgccgccttccggctccagtccccgggctcggcctcggcgaggtgtaattcgcagcgcgggccggccccggaggctctcggcgagcgcggcgcggtaacaagtgggcgaggatgccgtacgagatcaagaaggtgttcgccagcctcccgcaggtggagaggggcgtctccaagatcatcggcggcgaccctaagggcaacaattttctgtacaccaatggaaagtgcgtcatcctaaggaacatcgacaacccagcccttgctgacatctacacagagcacgcccatcaggtggtggtggccaagtatgcgcccagcggattctacattgcctccggagatgtgtctgggaagctgaggatctgggataccacgcagaaggagcacctgttgaagtatgagtaccagcctttcgctgggaagatcaaagacattgcttggactgaagacagtaagaggatcgccgtggtcggggaaggaagggagaagtttggagcagtcttcctctgggatagtggctcttctgtgggcgagattacaggacacaacaaagtcatcaacagcgtggacatcaagcagagccggccataccggctggccacgggaagcgatgataactgcgcggcattctttgagggacccccattcaagttcaagttcacaattggcgaccacagccgctttgtcaactgtgtgcgattctctcctgatgggaacagatttgccacagccagtgctgacggccagatatacatctatgacgggaagactggggagaaggtgtgcgcgctgggcggaagcaaggcccacgacggtgggatttacgcaattagttggagtcccgacagcacccatttgctttctgcttctggggacaaaacttccaagatttgggacgtcagcgtgaactccgtggtcagcacatttcccatgggctccacggttctggaccagcagctgggctgcctatggcagaaggaccacctgctcagtgtctccctgtccgggtacatcaactatctggacagaaacaaccccagcaagcccctgcacgtcatcaagggtcacagtaaatcgatccagtgtctgacggtgcataaaaacggcggcaagtcctacatttactctgggagccacgacggacacattaattactgggattcagagacgggggagaacgactccttcgctgggaaaggccacacgaaccaggtgtccaggatgaccgtggatgagtcggggcagctcatcagctgcagcatggacgacaccgtgcggtacaccagcctcatgctgcgggactacagcggacaaggagttgtgaaactggacgttcagccaaagtgcgtagccgtcggccccgggggatacgccgtggtcgtgtgcattggacagattgtcctgctgaaggatcagaggaagtgcttcagcatcgacaaccccggctacgagcccgaagttgtggcagtgcaccccggcggggacacggtggcaattgggggtgtggacggcaacgtccgcctgtattccatcctgggcaccacgctgaaggatgagggcaagctcctagaggccaagggccccgtgaccgacgtggcctactcccacgacggcgccttcctcgcggtgtgcgacgccagcaaggtggtcacagtgttcagcgttgctgacggctactcggagaacaatgttttttatggacaccatgcaaaaatcgtctgcctggcctggtccccagacaatgaacactttgcctccggtggcatggacatgatggtgtatgtttggaccctgagtgacccggaaaccagagtcaagatccaagatgcacaccggctgcaccatgtcagcagcctggcctggctggacgagcacacgctggtcacgacctcccatgatgcctctgtcaaggagtggacaatcacctactgaggagccccacccccgcctctggatggaccgaatcagggactagagtttaactgcagcggaacatgtcatttctctatttctgtgacgcgcccccatgcccccaccccaccacaagaggcaggagggcccagtcatgaccctcgtctctgcagggtgtctgtacacgttcttctgaaagctttagacagtaacagtttgcacatgaaaaataaagcgagcacctaaacaatgtgtggagcataactaaaacccacagcccaaccaaaccttgagaatgcgaaacattccagaggcagtagcctccaaagcacacagagcccctggccccgccgcggctctcactatctgtcaggggaggttgtacaggtgaatgagccggggggctcatgttcctgcctgcagaacatttctgtactagtgagaagagggaatatgcattgcagttcagcaaagccggaattctgtgttgaacagatgtctgtctccctagtgtgtgactcacaccttgtggctgccttcagagcgccacctccagatcagatggggacacacaacccctggatatgtttcattgtcagattttgtgcttgattttaagaatggaattgtgggtatctttcctttttttttaatgtatcttaactgttgcctgtcagtgtttacaaactagtgcgttgacggcaccgtgtccaagtttttagaacccttgttagccagaccgaggtgtcctggtcaccgtttcaccatcatgctttgatgttcccctgtctttccctcttctgctctcaagagcaaaggttaatttaaggacaaagatgaagtcactgtaaactaatctgtcattgtttttaccttccttttctttttcagtgcagaaattaaaagtaagtataaagcaccgtgattgggagtgtttttgcgtgtgtcggaatcactggtaaatgttggctgagaacaatccctccccttgcacttgtgaaaacactttgagcgctttaagagattagcctgagaaataattaaatatcttttctcttca

SEQ ID NO: 5 - DNA, 2626 bp, Homo sapiens
gcactccgctcctttcctgcgtcaccgctacacatgcgccttgcaaggaagggcgagatttcgggggcagggcggggggcgggcctaggccggggtctcacagcgactgcgcggacgggttcctgagtggaacatggcgacttgcgccgaaatcctgcggagcgagttccccgaaattgacggacaagtcttcgactacgtgaccggcgtcttgcacagcggcagcgcggacttcgagtctgtggatgacctggtggaagctgtaggggaactattgcaagaggtgtccggggacagcaaggatgacgcgggcatcagggccgtgtgccagcgcatgtacaacactctgcgtctggctgagccacaaagccagggaaatagccaggtgctactggacgcccctatccagttgtcaaagataacggagaactacgactgtggaaccaaacttccaggactgctaaagagggaacagtcctcgacagtgaatgcaaagaagttagagaaggccgaggctcgacttaaggcaaagcaggagaagcgctcagagaaggacacgctcaagaccagcaaccctctagtcttagaagaggcatcagccagccaggcaggcagcagaaaggagagtcggttggaatcatctggcaagaacaaatcctatgatgtgcgaattgagaactttgatgtgtcttttggcgatagagtactgctggctggagcggatgtgaacctggcatggggccgccgttacgggctggtggggcggaatgggttggggaagacaacgttactgaagatgctggccacccggagtctgcgggttccagcccacatttccctgctgcacgttgagcaagaggttgctggagatgacactcctgccctgcagagtgtgctggagagtgacagtgtgcgagaggatttgctacggagggagcgggagctcactgcccagattgctgctggcagggcggagggctctgaagctgcagagctggcagaaatctatgccaaactggaggagattgaggctgacaaggcacctgccagggcatcagtcattctcgctgggcttggctttacccctaaaatgcagcagcagcccacccgggagttctcaggtggctggaggatgaggctggccctggcccgggccctctttgctaggccagatcttctgctgttagatgaacctacaaacatgctggatgtcagggccatcctgtggctggagaattacctgcagacgtggccctccaccatcctagtcgtctcccacgaccgcaacttcttgaatgccatcgccacagacatcatccacctgcacagccagcggctagatggttaccggggagactttgagaccttcatcaagagtaagcaggagcggctgctcaaccagcagcgtgaatatgaggcgcagcagcagtatcgccagcacatccaggttttcattgaccggtttcgctacaatgccaacagggcctctcaagtgcagagtaaactcaagatgctggagaagctgcctgagctgaagcctgtggacaaggaatcagaggtcgtaatgaagttccctgatgggtttgagaagttctcgccgccaattctgcagctagatgaggtggatttctactacgatccgaagcacgtcatcttcagtcgcctctctgtgtctgctgatctcgagtctcgcatctgtgtggttggagagaatggggctgggaagtctaccatgctgaagctgcttttgggggacctggcacctgttcggggcatcagacacgctcacaggaatctgaagattggctatttcagccagcaccatgtggagcagctggacctaaacgtcagtgctgtggaactgctggcacgcaagtttcctgggcggcctgaggaggagtaccgtcaccagctgggtcggtatggcatctccggagaactggccatgcgtcctcttgccagcctgtctgggggccagaagagccgagtggcctttgctcagatgactatgccctgccccaacttctacattctggatgaacccacaaaccacctggacatggagaccattgaggctctgggccgtgccctcaacaatttcaggggtggtgtgattctggtgtcccacgatgagcgctttatcaggctggtgtgccgggagttgtgggtatgcgaaggaggcggcgtcacccgtgtggaaggaggatttgaccagtaccgcgccctcctccaggaacagttccgccgcgaaggcttcctctagggccaccaggctgaggactcgcccaggacatggactggtctctcagacccctgggccaccatgtaggccaccactccaggccgtggacttcccccaacttggggacagccttattcccaaatgtctctatccttttgactggagcatcttctgcacaaccttgggagcccatccaagggttggtgaggactggtctcccgggggtgggggtctggggggtaccctctggggttatagattcccccactgccccagctctgactggaccccaagtggctgctatgtaaattaaatctctccccgcgtctcaaaaaaaaaaaaaaaaaaaaaaaaaaaaaaaaaaaaaaaaaaaaaaaaaaaaaa

SEQ ID NO: 6 - DNA, 758 bp, Homo sapiens
gtctgaaggccgaggccaagatggcggtgctgtcagctcctggcctgcgcggcttccggatccttggtctgcgctccagcgtgggcccggctgtgcaggcacgaggtgtccatcagagcgtggccaccgatggcccaagcagcacccagcctgccctgccaaaggccagagccgtggctcccaaacccagcagccggggcgagtatgtggtggccaagctggatgacctcgtcaactgggcccgccggagttctctgtggcccatgaccttcggcctggcctgctgcgccgtggagatgatgcacatggcagcaccccgctacgacatggaccgctttggcgtggtcttccgcgccagcccgcgccagtccgacgtcatgatcgtggccggcacactcaccaacaagatggccccagcgcttcgcaaggtctacgaccagatgccggagccgcgctacgtggtctccatggggagctgcgccaacggaggaggctactaccactattcctactcggtggtgaggggctgcgaccgcatcgtgcccgtggacatctacatcccaggctgcccacctacggccgaggccctgctctacggcatcctgcagctgcagaggaagatcaagcgggagcggaggctgcagatctggtaccgcaggtagcgccgccgccgccgccgccggagcctgtcgccgtcctgtccccagcctgcttgtgtcccgtgaggttgtcaataaacctgccctcgggctgccgcc

SEQ ID NO: 7 - DNA, 2909 bp, Homo sapiens
gccagcggcgcggtcgggtgagaggccgcggcggcaggtccacctgggcttgcgaaggcacagattccccgtccacagctcacgaccagatgcaccagcaggagtccacatcgaggacgtcctccgggcactcccacgaccagtgaccaggagttaaactttgggatgtgcccgtgatgttggaccacaaggacttagaggccgaaatccaccccttgaaaaatgaagaaagaaaatcgcaggaaaatctgggaaatccatcaaaaaatgaggataacgtgaaaagcgcgcctccacagtcccggctctcccggtgccgagcggcggcgttttttctttcattgtttctctgcctttttgtggtgttcgtcgtctcattcgtcatcccgtgtccagaccggccggcgtcacagcgaatgtggaggatagactacagtgccgctgttatctatgactttctggctgtggatgatataaacggggacaggatccaagatgttctttttctttataaaaacaccaacagcagcaacaatttcagccgatcctgtgtggacgaaggcttttcctctccctgcacctttgcagctgctgtgtcgggggccaacggcagcacgctctgggagagacctgtggcccaagacgtggccctcgtggagtgtgctgtgccccagccaagaggcagtgaggcaccttctgcctgcatcctggtgggcagacccagttctttcattgcagtcaacttgttcacaggggaaaccctgtggaaccacagcagcagcttcagcgggaatgcgtccatcctgagccctctgctgcaggtgcctgatgtggacggcgatggggccccagacctgctggttctcacccaggagcgggaggaggttagtggccacctctactccggcagcaccgggcaccagattggcctcagaggcagccttggtgtggacggggaaagtggcttcctccttcacgtcaccaggacaggtgcccactacatcctctttccctgcgcaagctccctctgcggctgctctgtgaagggtctctacgagaaggtgaccgggagcggcggcccgttcaagagtgacccgcactgggagagcatgctcaatgccaccacccgcaggatgctttcccacagctctggagcagtgcgctacctgatgcatgtcccagggaacgccggtgcagatgtgcttcttgtgggctcagaggccttcgtgctgctggacgggcaggagctgacgcctcgctggacacccaaggcagcccatgtcctgagaaaacccatcttcggccgctacaaaccagacaccttggctgtagccgttgaaaacggaactggcaccgacagacagatcctgtttctggaccttggcactggagccgtcctgtgtagcctagccctcccgagcctccctgggggtccactgtccgccagcctgccgaccgcagaccaccgctcagccttcttcttctggggcctccacgagctggggagcaccagcgagacggagaccggggaggcccggcacagcctgtacatgttccaccccaccctgccgcgcgtgctgctggagctggccaatgtctctacccacattgtcgcctttgacgccgtcctgtttgagccaagccgccacgccgcctacatccttctgacaggcccggcagactcagaggcacccggcctggtctctgtgatcaagcacaaggtgcgggaccttgtcccaagcagcagggtggtccgcctgggtgagggtgggccagacagtgaccaagccatcagggaccggttctcccggctgcggtaccagagtgaggcgtagaggcacgccagccagagcctgtggagagactccgcctgctgacactaaacgtcctgggaagtgggcccttccctgggtctctgcactgactcccccactcctgaccctggtgatggtcgccactgggcagcagcagccttaccagtcctccatgatcacacccagggacctgcatgggtgaggggacaccctgggcctctctcccgcccagcatcctccctgagtccccacacagggcctcactctgcaccccaccagggtcccgctcacaccaggcagccttcatagtggtctccctggccaccttgggcagagctgggtcatgcagcaccccatccttacccggtgccctctccttgccagcttctccccaggccagagcggccatcgcgtagaaagaaccagggtgtccccgggacaggccgtcccccaccccatcctgtagaagtccattccccttttccctcctgtgctctgtcccccaaggagtcatggaactcagggtactgggcctcaacgggaacctgagacagctccagcttcgcagcccttcccggagctacagggggatcctctagcatggggggtgtgacttggttcctttgaccaggtcctgtgaggaagcctggagcaagggtctcccccagcaggatgggtggggcctgctctggagctgagcccgtggccgctcacaggtgtccttagtggtgttgcagctgtctactggctgcatgtgctgtgaatatcccaaggaactggctgtggaatgcgtgtttgggtcagtctgtgccctctcagtagacactggagctgctctgtccctgaagaggccccgtgccccaggcatggcaagcgcctgcctctccccttccggtgctcacacgcccacgccgtgccacccgatgcaggactcacctctgtgccttgctgctcctgaggcccaagggcagccatggtgctctgtactgctcgggccgcccaggtcacagagcctgagcttcgtagccaaagcagcctgatgacccacccaccaaggaagaaagcagaataaacatttttgcactgcctgaaaaa

SEQ ID NO: 8 - DNA, 3433 bp, Homo sapiens
cggctcagagctccggaccgcgggcggaggggaggggcagggggcggtgccacggcctgccagcccgcccgcccgcccgccagccagccctccccgcggccggctcggctccttggcgctgcctggggtcctttccgcccggtccccgcttgccagcccccgctgctctgtgccctgtccggccaggcctggagccgacaccaccgccatcatgccggccgtgtccaagggcgatgggatgcgggggctcgcggtgttcatctccgacatccggaactgtaagagcaaagaggcggaaattaagagaatcaacaaggaactggccaacatccgctccaagttcaaaggagacaaagccttggatggctacagtaagaaaaaatatgtgtgtaaactgcttttcatcttcctgcttggccatgacattgactttgggcacatggaggctgtgaatctgttgagttccaataaatacacagagaagcaaataggttacctgttcatttctgtgctggtgaactcgaactcggagctgatccgcctcatcaacaacgccatcaagaatgacctggccagccgcaaccccaccttcatgtgcctggccctgcactgcatcgccaacgtgggcagccgggagatgggcgaggcctttgccgctgacatcccccgcatcctggtggccggggacagcatggacagtgtcaagcagagtgcggccctgtgcctccttcgactgtacaaggcctcgcctgacctggtgcccatgggcgagtggacggcgcgtgtggtacacctgctcaatgaccagcacatgggtgtggtcacggccgccgtcagcctcatcacctgtctctgcaagaagaacccagatgacttcaagacgtgcgtctctctggctgtgtcgcgcctgagccggatcgtctcctctgcctccaccgacctccaggactacacctactacttcgtcccagcaccctggctctcggtgaagctcctgcggctgctgcagtgctacccgcctccagaggatgcggctgtgaaggggcggctggtggaatgtctggagactgtgctcaacaaggcccaggagccccccaaatccaagaaggtgcagcattccaacgccaagaacgccatcctcttcgagaccatcagcctcatcatccactatgacagtgagcccaacctcctggttcgggcctgcaaccagctgggccagttcctgcagcaccgggagaccaacctgcgctacctggccctggagagcatgtgcacgctggccagctccgagttctcccatgaagccgtcaagacgcacattgacaccgtcatcaatgccctcaagacggagcgggacgtcagcgtgcggcagcgggcggctgacctcctctacgccatgtgtgaccggagcaatgccaagcagatcgtgtcggagatgctgcggtacctggagacggcagactacgccatccgcgaggagatcgtcctgaaggtggccatcctggccgagaagtacgccgtggactacagctggtacgtggacaccatcctcaacctcatccgcattgcgggcgactacgtgagtgaggaggtgtggtaccgtgtgctacagatcgtcaccaaccgtgatgacgtccagggctatgccgccaagaccgtctttgaggcgctccaggcccctgcctgtcacgagaacatggtgaaggttggcggctacatccttggggagtttgggaacctgattgctggggacccccgctccagccccccagtgcagttctccctgctccactccaagttccatctgtgcagcgtggccacgcgggcgctgctgctgtccacctacatcaagttcatcaacctcttccccgagaccaaggccaccatccagggcgtcctgcgggccggctcccagctgcgcaatgctgacgtggagctgcagcagcgagccgtggagtacctcaccctcagctcagtggccagcaccgacgtcctggccacggtgctggaggagatgccgcccttccccgagcgcgagtcgtccatcctggccaagctgaaacgcaagaaggggccaggggccggcagcgccctggacgatggccggagggaccccagcagcaacgacatcaacgggggcatggagcccacccccagcactgtgtcgacgccctcgccctccgccgacctcctggggctgcgggcagcccctcccccggcagcacccccggcttctgcaggagcagggaaccttctggtggacgtcttcgatggcccggccgcccagcccagcctggggcccacccccgaggaggccttcctcagcccaggtcctgaggacatcggccctcccattccggaagccgatgagttgctgaataagtttgtgtgtaagaacaacggggtcctgttcgagaaccagctgctgcagatcggagtcaagtcagagttccgacagaacctgggccgcatgtatctcttctatggcaacaagacctcggtgcagttccagaatttctcacccactgtggttcacccgggagacctccagactcagctggctgtgcagaccaagcgcgtggcggcgcaggtggacggcggcgcgcaggtgcagcaggtgctcaatatcgagtgcctgcgggacttcctgacgcccccgctgctgtccgtgcgcttccggtacggtggcgccccccaggccctcaccctgaagctcccagtgaccatcaacaagttcttccagcccaccgagatggcggcccaggatttcttccagcgctggaagcagctgagcctccctcaacaggaggcgcagaaaatcttcaaagccaaccaccccatggacgcagaagttactaaggccaagcttctggggtttggctctgctctcctggacaatgtggaccccaaccctgagaacttcgtgggggcggggatcatccagactaaagccctgcaggtgggctgtctgcttcggctggagcccaatgcccaggcccagatgtaccggctgaccctgcgcaccagcaaggagcccgtctcccgtcacctgtgtgagctgctggcacagcagttctgagccctggactctgccccgggggatgtggccggcactgggcagccccttggactgaggcagttttggtggatgggggacctccactggtgacagagaagacaccagggtttgggggatgcctgggactttcctccggccttttgtatttttatttttgttcatctgctgctgtttacattctggggggttagggggagtccccctccctccctttcccccccaagcacagaggggagaggggccagggaagtggatgtctcctcccctcccaccccaccctgttgtagcccctcctaccccctccccatccaggggctgtgtattattgtgagcgaataaacagagagacgctaa

SEQ ID NO: 9 - DNA, 426 bp, Homo sapiens
agagcaccccaaacttgacgccatgaagatcccggtccttcctgccgtggtgctcctctccctcctggtgctccactctgcccagggagccaccctgggtggtcctgaggaagaaagcaccattgagaattatgcgtcacgacccgaggcctttaacaccccgttcctgaacatcgacaaattgcgatctgcgtttaaggctgatgagttcctgaactggcacgccctctttgagtctatcaaaaggaaacttcctttcctcaactgggatgcctttcctaagctgaaaggactgaggagcgcaactcctgatgcccagtgaccatgacctccactggaagagggggctagcgtgagcgctgattctcaacctaccataactctttcctgcctcaggaactccaataaaacattttccatccaaca

SEQ ID NO: 10 - DNA, 515 bp, Homo sapiens
acggctgcccaacccggtcccagccatgtccaacgtcccccacaagtcctcactgcccgagggcatccgccctggcacggtgctgagaattcgcggcttggttcctcccaatgccagcaggttccatgtaaacctgctgtgcggggaggagcagggctccgatgccgcgctgcatttcaacccccggctggacacgtcggaggtggtcttcaacagcaaggagcaaggctcctggggccgcgaggagcgcgggccgggcgttcctttccagcgcgggcagcccttcgaggtgctcatcatcgcgtcagacgacggcttcaaggccgtggttggggacgcccagtaccaccacttccgccaccgcctgccgctggcgcgcgtgcgcctggtggaggtgggcggggacgtgcagctggactccgtgaggatcttctgagcagaagcccaggcgggcccggggccttggctggcaaataaagcgttagcccgcagcgaaaaaaaaaaaaaaaaaaaaa

SEQ ID NO: 11 - DNA, 551 bp, Homo sapiens
gccaaacaccttcctgacaccatgagggccagcagcttcttgatcgtggtggtgttcctcatcgctgggacgctggttctagaggcagctgtcacgggagttcctgttaaaggtcaagacactgtcaaaggccgtgttccattcaatggacaagatcccgttaaaggacaagtttcagttaaaggtcaagataaagtcaaagcgcaagagccagtcaaaggtccagtctccactaagcctggctcctgccccattatcttgatccggtgcgccatgttgaatccccctaaccgctgcttgaaagatactgactgcccaggaatcaagaagtgctgtgaaggctcttgcgggatggcctgtttcgttccccagtgagagggagccggtccttgctgcacctgtgccgtccccagagctacaggccccatctggtcctaagtccctgctgcccttccccttcccacactgtccattcttcctcccattcaggatgcccacggctggagctgcctctctcatccactttccaataaagagttccttctgctcca

SEQ ID NO: 12 - DNA, 619 bp, Homo sapiens
accagttctaagggaccatacagagtattcctctcttcacaccaggaccagtcactgttgcagcatgagttcccagcagcagaagcagccttgcaccccaccccctcagcttcagcagcagcaggtgaaacagccttgccagcctccacctcaggaaccatgcatccccaaaaccaaggagccctgccaccccaaggtgcctgagccctgccaccccaaagtgcccgagccctgccagcccaaggttccagagccatgccaccccaaggtgcctgagccctgcccttcaatagtcactccagcaccagcccagcagaagaccaagcagaagtaatgtggtccacagccatgcccttgaggagccggccaccagatgctgaatcccctatcccattctgcgtatgagtcccatttgccttgcaattagcattctgtctcccccaaaaaagaatgtgctatgaagctttctttcctacacactctgagtctctgaatgaagctgaaggtcttagtaccagagctagttttcagctgctcagaattcatctgaagagagacttaagatgaaagcaaatgattcagctcccttatacccccattaaattcactttcaattcca

SEQ ID NO: 13 - DNA, 677 bp, Homo sapiens
aaacccctggtacctgagcactgatctgccttggagaacctgatcctgagactccagcaggatgtcttatcaacagcagcagtgcaagcagccctgccagccacctcctgtgtgccccacgccaaagtgcccagagccatgtccacccccgaagtgccctgagccctgcccaccaccaaagtgtccacagccctgcccacctcagcagtgccagcagaaatatcctcctgtgacaccttccccaccctgccagtcaaagtatccaccgaagagcaagtaacagcttcagaattcatcaggaccaagaaaggataaggatatttggctcacctcgttccacagctccaccttcatcttctcatcaaagcctaccatggatacacagggagcttctttctccttagccagtaatctgcccatgatgatccctgacagcaaaaagtttcttttctgaggctgccatactgccactgtccaggtggagactgagcaaaggaagtcctgggctgtgccagctcccagagcttcggaagaaagagcagcagctctctccctgggaaccatcagagaattctgttgatgtgttctgtgtctgtctgtcacctggtcacgagcttctaccacctttgcaattgtcacttatctttcactccctgaataaagtatctatgcatata

SEQ ID NO: 14 - DNA, 2451 bp, Homo sapiens
agaggagtgtttagctccttcccttactctaccttgctcctacttttctctaagtcaacatgagtcgacagtttagttccaggtctgggtaccgaagtggagggggcttcagctctggctctgctgggatcatcaactaccagcgcaggaccaccagcagctccacacgccgcagtggaggaggtggtgggagattttcaagctgtggtggtggtggtggtagctttggtgctggtggtggatttggaagtcggagtcttgttaaccttggtggcagtaaaagcatctccataagtgtggctagaggaggtggacgtggtagtggctttggtggtggttatggtggtggtggctttggtggtggtggctttggtggtggtggctttggtggaggtggcattgggggtggtggctttggtggttttggcagtggtggtggtggttttggtggaggtggctttgggggtggtggatatgggggtggttatggtcctgtctgccctcctggtggcatacaagaagtcactatcaaccagagccttcttcagcccctcaatgtggagattgaccctgagatccaaaaggtgaagtctcgagaaagggagcaaatcaagtcactcaacaaccaatttgcctccttcattgacaaggtgaggttcctggagcagcagaaccaggtactgcaaacaaaatgggagctgctgcagcaggtagatacctccactagaacccataatttagagccctactttgagtcattcatcaacaatctccgaaggagagtggaccaactgaagagtgatcaatctcggttggattcggaactgaagaacatgcaggacatggtggaggattaccggaacaagtatgaggatgaaatcaacaagcggacaaatgcagagaatgaatttgtgaccatcaagaaggatgtggatggtgcttatatgaccaaggtggaccttcaggccaaacttgacaacttgcagcaggaaattgatttccttacagcactctaccaagcagagttgtctcagatgcagactcaaatcagtgaaactaatgtcatcctctctatggacaacaaccgcagtctcgacctggacagcatcattgctgaggtcaaggcccagtacgaggatatagcccagaagagcaaagctgaggccgagtccttgtaccagagcaagtatgaagagctgcagatcactgctggcagacatggggatagtgtgagaaattcaaagatagaaatttctgagctgaatcgtgtgatccagagacttagatctgaaatcgacaatgtcaagaagcagatctccaacttgcagcagtccatcagtgatgcagagcagcgtggcgagaatgccctcaaggatgccaagaacaagctgaatgacctggaggatgccctgcagcaggccaaggaagacctggcccgcctgctgcgcgactaccaggagctgatgaacacaaagctggccctggatctggagattgccacctacaggaccctcctggagggagaagaaagcaggatgtctggagaatgtgccccgaacgtgagtgtgtctgtgagcacaagccacaccaccatcagtggaggtggcagccgaggaggtggcggcggtggctacggctctggaggtagcagctatggctccggaggtggtagctatggttctggaggtggcggcggcggcggccgtggcagctatggctccggaggtagcagctacggctccggaggtggcagctatggctctggaggtggcggcggcggccatggcagctacggctccggaagcagcagtgggggctacagaggtggctctggaggcggcggcggcggcagctctggcggccggggctctggcggcgggagctctggaggctccataggaggccggggatccagctctgggggtgtcaagtcctctggtggcagttccagcgtgaagtttgtttctaccacttattccggagtaaccagataaagagatgccctctgtttcattagctctagttctcccccagcatcactaacaaatatgcttggcaagaccgaggtcgatttgtcccagccttaccggagaaaagagctatggttagttacactagctcatcctattcccccagctctttcttttctgctgtttcccaatgaagttttcagatcagtggcaatctcagtcccctggctatgaccctgctttgttctttccctgagaaacagttcagcagtgaccaccacccacatgacatttcaaagcacctccttaagccagccagagtaggaccagttagacccagggtgtggacagctccttagcatcttatctctgtgctgttttggttttgtacataaggtgtaagcaagttgtttttcttttgtggagaggtcttaaactccccatttccttgttttgctgcaataaactgcatttgaaattc

SEQ ID NO: 15 - DNA, 1707 bp, Homo sapiens
agacacacatagcctctctgcccacctctgcttcctctaggaacacaggagttccagatcacatcgagttcaccatgaattcactcagtgaagccaacaccaagttcatgttcgacctgttccaacagttcagaaaatcaaaagagaacaacatcttctattcccctatcagcatcacatcagcattagggatggtcctcttaggagccaaagacaacactgcacaacagattaagaaggttcttcactttgatcaagtcacagagaacaccacaggaaaagctgcaacatatcatgttgataggtcaggaaatgttcatcaccagtttcaaaagcttctgactgaattcaacaaatccactgatgcatatgagctgaagatcgccaacaagctcttcggagaaaaaacgtatctatttttacaggaatatttagatgccatcaagaaattttaccagaccagtgtggaatctgttgattttgcaaatgctccagaagaaagtcgaaagaagattaactcctgggtggaaagtcaaacgaatgaaaaaattaaaaacctaattcctgaaggtaatattggcagcaataccacattggttcttgtgaacgcaatctatttcaaagggcagtgggagaagaaatttaataaagaagatactaaagaggaaaaattttggccaaacaagaatacatacaagtccatacagatgatgaggcaatacacatcttttcattttgcctcgctggaggatgtacaggccaaggtcctggaaataccatacaaaggcaaagatctaagcatgattgtgttgctgccaaatgaaatcgatggtctccagaagcttgaagagaaactcactgctgagaaattgatggaatggacaagtttgcagaatatgagagagacacgtgtcgatttacacttacctcggttcaaagtggaagagagctatgacctcaaggacacgttgagaaccatgggaatggtggatatcttcaatggggatgcagacctctcaggcatgaccgggagccgcggtctcgtgctatctggagtcctacacaaggcctttgtggaggttacagaggagggagcagaagctgcagctgccaccgctgtagtaggattcggatcatcacctacttcaactaatgaagagttccattgtaatcaccctttcctattcttcataaggcaaaataagaccaacagcatcctcttctatggcagattctcatccccgtagatgcaattagtctgtcactccatttggaaaatgttcacctgcagatgttctggtaaactgattgctggcaacaacagattctcttggctcatatttcttttctttctcatcttgatgatgatcgtcatcatcaagaatttaatgattaaaatagcatgcctttctctctttctcttaataagcccacatataaatgtactttttcttccagaaaaattctccttgaggaaaaatgtccaaaataagatgaatcacttaataccgtatcttctaaatttgaaatataattctgtttgtgacctgttttaaatgaaccaaaccaaatcatactttttctttgaatttagcaacctagaaacacacatttctttgaatttaggtgatacctaaatccttcttatgtttctaaattttgtgattctataaaacacatcatcaataaaatagtgacataaaatca

SEQ ID NO: 16 - DNA, 1820 bp, Homo sapiens
gccctcccctcccgatcccggagccatgtggcccctggccctagtgatcgcctccctgaccttggccttgtcaggaggtgtctcccaggagtcttccaaggttctcaacaccaatgggaccagtgggtttctcccaggtggctacacctgcttcccccactctcagccctggcaggctgccctactagtgcaagggcggctactctgtgggggagtcctggtccaccccaaatgggtcctcactgccgcacactgtctaaaggaggggctcaaagtttacctaggcaagcacgccctagggcgtgtggaagctggtgagcaggtgagggaagttgtccactctatcccccaccctgaataccggagaagccccacccacctgaaccacgaccatgacatcatgcttctggagctgcagtccccggtccagctcacaggctacatccaaaccctgcccctttcccacaacaaccgcctaacccctggcaccacctgtcgggtgtctggctggggcaccaccaccagcccccaggtgaattaccccaaaactctacaatgtgccaacatccaacttcgctcagatgaggagtgtcgtcaagtctacccaggaaagatcactgacaacatgttgtgtgccggcacaaaagagggtggcaaagactcctgtgagggtgactctgggggccccctggtctgtaacagaacactgtatggcatcgtctcctggggagacttcccatgtgggcaacctgaccggcctggtgtctacacccgtgtctcaagatacgtcctgtggatccgtgaaacaatccgaaaatatgaaacccagcagcaaaaatggttgaagggcccacaataaaagttgagaaatgtaccggcttccatcctgtcaccatgacttcctcacatggtctgcttagcccttctctgctccttattcccagtgttccatttgaaccagtgatccatgtcctgaaaaatgctcaatctcagctaacattccatgtttcagaagcattcaggcactgccaggcttgcagtctcccagatgttgcatccctgaaacatctcaacaacctgaatgtcccaacccagacaatggcccaggtctctcaacttcatcagtgtggcttctatgagcccagatcaccacctgaacgttctgtctgtggcacattcttaaatatttccatcagcccatctcaacaatatatgtcctataaatggaccatccttgacaacatcctctaactcttcaagtatttattcaatgccagtatcctagaccttctattttttgcactcaagaaggctctagactcccatgatagttcatcctgaaaatattctcttatgcccacaatcttctgccctgacaacattctgtgtacctctgtgactcaccacagctaacattggatcctcagaatatttcattctcacactgttatgggtgtctcagaagtcccaacccaacctacatcccacattcttccaataccccacctctgccaacattccctctctgaatcaatggcaccctagtctctagagttatagggttcagtataccaaagggtcttcttgcctgaactttattgtctaccaaatattccgtcttgtatcccctccatgaacatccttggtcagtgtcccttgctgttacatctttgtgcatgaccctaaaatgtagtgcaaatccttgctttggacaagttataaaactcacagtctctgtgctttctcatctgtaaaatgggttcataattttttttaattgtaacattattacaagaataaatgtcaagcatttatcacta

SEQ ID NO: 17 - DNA, 7779 bp, Homo sapiens
ggagtgcgcgccgagcgaagggcggcggcggtggcggcggcggctcgtgctcggccccggctgcgattgcgctcagctccaggttccctgcccgcggcggcgcgcccccagcgctccctgcaccccgcgccacccgcacccgcgctcggcccgctgcgggcggaggagcggccatgccgccgcggcgcagcatcgtggaggtgaaggtgctagacgtgcagaagcggcgggtgcccaacaagcattatgtctacatcatccgggtcacgtggtccagcggctccaccgaggccatttaccggcgctacagcaagttttttgacctccagatgcagatgttggacaaatttcccatggaaggaggacagaaggaccccaagcagcggatcatcccctttctgccaggtaagattctcttcagacgaagccacatccgggacgtggctgtcaaacgcctgataccaattgatgaatactgtaaggccctcatccagctgcccccctacatctctcagtgtgatgaggtgctgcagttctttgagacaagacctgaggacctgaatccccccaaagaggagcacattgggaaaaagaaatctgggggtgaccaaacctcagtggaccccatggtcctggagcagtatgtggtggtagccaactaccagaagcaggagagttcggagatcagcctcagcgtggggcaggtggtggacatcatcgagaagaatgagtcaggttggtggttcgtcagcactgccgaggagcaaggctgggtccctgcaacgtgcctcgaaggccaggatggggtgcaggatgagttttctctgcagcctgaagaagaggagaagtacacagtcatctacccgtacacagctcgggaccaggatgaaatgaacctggagagaggggctgtggtggaggtcatccagaaaaacctggaaggctggtggaagatcaggtaccagggcaaagaaggctgggcccccgcctcctacctaaagaagaacagtggggagcccttgcccccgaagccaggccctggctcaccctcccacccgggtgcccttgacttggatggtgtttcccggcagcagaacgcggtgggcagggagaaggagctgctcagcagccagagggacgggcggtttgaaggccgcccggtgcccgacggtgacgccaagcagagatcaccaaagatgaggcagagaccccctcctcgccgggacatgaccattcctcgaggcctcaacctgccgaagccgcccatcccgccccaagtggaggaagagtattacaccatcgccgaattccagacaaccatcccagacggcatcagcttccaggcaggcctgaaggtcgaggtgatcgagaaaaacttgagtggctggtggtacattcagattgaagataaggaagggtgggccccggccaccttcattgacaagtacaagaagacgagcaacgcgtcgagacccaactttctggctcccctgccccacgaggtgacccagctccggctgggggaagcagcagcgctggagaacaacacgggcagcgaagccacgggcccctcccggcccctgcctgacgcaccgcatggtgtcatggactcggggttgccatggtctaaagactggaagggcagtaaggatgtcctgaggaaggcatcttcagacatgtctgcgtcagcaggctacgaggagatctcagaccccgacatggaggagaagcccagcctccctccgcggaaagaatccatcatcaagtcggagggggagctgctggagcgggagcgggagcggcagaggacggagcagctccggggccccactcccaagcctccgggcgtgattttgccgatgatgccagccaaacacatccctccagcccgggacagcaggaggccagagcccaaacctgacaaaagcagactgttccagctgaaaaatgacatggggctggagtgtggccacaaggtcttggccaaggaagtgaagaagcccaacctccggcccatctccaaatccaaaactgacctgccagaggagaagccagatgccactccccagaatcccttcttgaagtccagacctcaggttaggccaaaaccagctccttcccccaaaacggagccacctcagggcgaagaccaagtcgacatctgcaacctcaggagtaagctcaggcctgccaagtcccaagacaagtccttgttggatggggagggcccccaggcagtagggggccaagacgtggccttcagccgaagcttcctcccaggagaggggcctggccgcgcccaggacaggacgggcaaacaggatggtctcagcccaaaagagatttcctgcagagcccctccgaggccagccaagaccacagatcctgtgtctaagagcgtgcctgttcctctccaagaggctccccagcagagacctgtggtcccaccccgcagaccacctcccccaaagaaaacctcttcgtcatccaggccgctcccagaggtcagaggtccacagtgtgaaggccacgaaagcagggcagctcccaccccaggccgtgctctcctcgtccctccaaaagccaaaccttttctctccaactctttggggggccaggatgacacgcgaggcaaaggcagcctggggccatgggggaccggcaagattggagaaaacagggagaaagcagctgcagcctctgtccccaatgccgacggcctgaaggactctttgtatgtggccgtggccgactttgaaggagacaaagacaccagcagcttccaggaagggacagtgtttgaagtccgggagaagaacagcagtggctggtggttctgccaggtcctgagcggagccccttcctgggaagggtggattccttccaactatctcagaaagaagccgtagccgactccctttctgcctagagggcccgctggtccttgctggctttacccacgtatttaatacgcctcttaatttatcattctccacgcagcttccaaggcagacagactctggggtactgtgacttcttgcctcccatgggtggagagtgagtttcggacacctcgggcgcccctgggcctgatccctcctatcacagcatcactggaggctcagaacccacagcctttgctttctgtccatgtcagcatccctgccttaagagaactcctcctggccaatggcattgccacccagcagtgggaccaagactctccaagacctccaggactggatcccattgcctggagaaactccagcaagggtctctcatggcttggacatggcacagtaaggggcagccaacccagtccatgatgacttttgctccaacttcttcatgtttctaaaagcccagtggctttattcactcctcctaaattgcctgctaccagaaggaacttcatcctgaagaaatgcattccattaccagttccagggaaagtgtccccttccccaaagcctcaggcccgtgggcctctgaggttccactggatgcggctcccccaggagtgggcctggagatccgctcagccgccctgcctcccaccttctatcttgggaccgtggtcagccctgaagggtggttccagccccgcgtatgctgcgctttgctgctgcaggctccggtccctccagggcttttcaatgagagttcccaccccaacttggagcatttcatttttgcctacctaaagcaagaatctcaaagtttgtttgaataagaggcccattcacaagtcgtgcccttgtgagcacccctttgctgagtgcctcgtgggtgccaaacactgtacttggcgctttgcattcatgctttgaccctcacaacctccctttatagatgaggaaattcacgctccatgtgcccaaggacacaccagccaggaggaagagggaagaggatttgagtccaggcctgcctgacttcagtgcctgtgccctcccctctgtaaaagacaaaccaggcagggaagagatagaagctggctaagtggtggccaagtggcttcattgtgaggggggtgagggggcattcgtggctgctcccacacccaccatccctccagcccacagcagcctataccaaaggctgccctggactcaacagctgcatctccatgacaggagaatgccagggtcctggtggttgacacagagccctgttccctcttctaagctgttgccccctggggaatagagcttatggagcaacgggagctgaggtggcctcgagggccagcctggagggctctgagcatagcatgcagcggtcccatagggaggcaggtaaccaagggccaggcagagctgcttcctgtgcctctccggcatttgtaatgtttttttcttttttcacgcactgccaaatctgttttctcccttgaagaaacccagggcagatgtggtcatctgtcaaactgaggtctggagaggcatgactaaatcactgcagaagcaaaatcaggacccagcatttctagctcccagcccagagtaagagagcagagcagaaccccttcccattctacccgaccgaggcagccctgccctgccctgccccgcccctccccaccctgccctgccccagagatctccagttcacagtgttcatcaggcgagatacttttggacccacaaagccagttttttggggggatgctcagtgtctacctgcagtgccaaagttttgcttgaacagccctcttctgccgcgcctcccagctccaccccctatcacgtgggtgctggctgcttctgcgtgaggagcttcctctgatcacctgtagcatctttagtgccttcgtccagtcggcctgcaaatcccatttcccagagaggcttgggcagggcccacttgccacttggccctgtgcccagagcgttgggggcagatggcagccaggggaagaagggaggtggggaagggccgccaccgcttgagggtcccctcccttgagaggaggccccatggcagttttcctgagttcttgatccactttggtttaaacaacttttgtgaagctatgtgagatttgactgcatttcaaaagacaaaacacatgtttttttctgatttgctctttgcctttcagcgacgctttcagatactttgtgagtgtctactctgtgctaggtgctgagtagactgggatgtgtgtggctccatccctggctggaagagctttgagtcctgtctgctgacttcactgaaggagtttctctcttgcttcattccttcctcccgggggtcagctgggtaggagcagacttgccctgccttcctctaggcagaaagttttcctgcaaatgaaagaatctgccattctcttttgctatgatgatgatgattattctgacatgacccgcgggtactgaagccacagtcctctctgttcactgttctctccttgagtcatatctatggcctgaggacgtctgtatccagctccttttcctacaatggtagacacttccccaggcagtgggtgggtcagggtggccagtcactctcctagctgtccttgcctggggacttagatttaccccatccaggactgtggtcgctattctgtgagcgattgatggcgcatatgcagaactcccctggagtcatggctctagaaagtgtccaggcccatcgtgacaatggtgccaagcaccgggctggtgaccagtgcctaaacacacacgctcctttaatccttacggcaagcctgtgaggcggataggaccagccctgatctatagtgagaaaattaaggttcagagggagaaggtccaaatagtggccaagctgggactgagatctcgagtttgggtttgtttggttttgttgttgttgttctttccctcgtgtccatgacttttctctgccattagcagggaagtgtgcggagggcttccagggaatcaagtgaccctccctctgaatttcggtgcctcttccccccgccccttgctcacacatttcagtaggtcacaggccaaatggcagcccaaaaggtgggcagagatttttttttcttcccctcacccctgcttattaacacaattgtgacaactactttaccttacatcccagggcaaacggacagcttgcggtacctccaaaaatttggaaaaccctgagtctaagaccacctcttgataaaagaggcctttgctcacatgttctgctcggaatctttctttgccattggtgggtgtatgtcgtcccagctgagactgcgggagagctgagctccagcttaaaccgcttttaatggcccttccctactgggggatcgctggagcccatgccaggttacggtagtcattttaaacctctgccacaaggccacgccatagaatcaatttccaagtcaatgttcttggccctaaaatgtttgcgcccactgaggatttcattaccaggtggaagatgggggaacatatgccacgttaaagagcaagtgctgagtgtgccaggacttgagaaggaccttaggctgaggagtggacagtctggtatttatttcgcctctcccaagtacccagcacagagtgggaaaaagaagaaactgctcctgccttccagtagctggcaacttgacatcaagaacaaaaacattcgtagctggacccccgtcctttcatcgtgcccaagtcttacatgttggcttaagctgcccccttggaggccgtacctttctctttggactgtgacagtggacacctaacagcctgagccatgtgtggctgtcttatcccccaagggttgtccaggcccgttctgcagggctgttgtgtagactgcagacatccatacctcaccacagaccaaagatgacctcgtgtcagactgtgggctgatgagaggtagagcagcatgcatcgaggcctgagggtgcagggcgccctctcttggcctggaggaattgctcctaactagagtaagtttccacgagggtcccaggcagagctgcagagctggaaccggaggctccacagtccttgcctgctcatggacctccttcagagcacctttctacagactggactgcccagctccgtggggtggcatctggtttctggtgctattctgccaagttatcgagctcctcctcatgtttcaacattccatcttcccgtttctatcctcgactccaaagtaagccttcttagctccaatcagggatgaggggctcaacctcttctgtcctcaaagaggccaaacgcagtgccacagtcggtagccttcacttttagatgtcctattcatgtaaaaaagaaggtgcccccaccaggcttacatcagcaataagcaattctaatgcaacgatggtgtccacattttaccccagtgtgtgcccatgtatgcctttgtgcccgtgtaattattgttagcgcccctttcacttagaggggtgatgataaactgtggccaccttgattacaacccacatttcctgctttggggagcttccaagtaacaggccatttcttacctccctccaggaacagtgggcactgcccaccacctcgtgtctgctcataggatgacgctggagatccccacacttactctaccctcttggcaaattggcattccggtggtggtttttgtttcctttaacacattaaataaatgagtatataggatgtgaggggaggggtgagaacaactagctgtagcatgtgtaggctatatactttaccatttgacttctttcctttttttttttttaaataaaaaaagtgcttgactggtttcaagcttcatcatgaa

SEQ ID NO: 18 - DNA, 2153 bp, Homo sapiens
agcactatccttgcttaggcctgagccacagaagctgctcagggactatccatggcctccccgtggccaacttgagtctgctctgcagctttaggcccgacttggaaggcccatgggctgcagatgaggaaactgaggtccagacagccgaagagtggtagtgtccaggacacacaactgggccggcggcggcggctgccccgagggacgcggccctaggcggtggcgatggggaccgcccggatcgcacccggcctggcgctcctgctctgctgccccgtgctcagctccgcgtacgcgctggtggatgcagatgacgtcatgactaaagaggaacagatcttcctgctgcaccgtgctcaggcccagtgcgaaaaacggctcaaggaggtcctgcagaggccagccagcataatggaatcagacaagggatggacatctgcgtccacatcagggaagcccaggaaagataaggcatctgggaagctctaccctgagtctgaggaggacaaggaggcacccactggcagcaggtaccgagggcgcccctgtctgccggaatgggaccacatcctgtgctggccgctgggggcaccaggtgaggtggtggctgtgccctgtccggactacatttatgacttcaatcacaaaggccatgcctaccgacgctgtgaccgcaatggcagctgggagctggtgcctgggcacaacaggacgtgggccaactacagcgagtgtgtcaaatttctcaccaatgagactcgtgaacgggaggtgtttgaccgcctgggcatgatttacaccgtgggctactccgtgtccctggcgtccctcaccgtagctgtgctcatcctggcctactttaggcggctgcactgcacgcgcaactacatccacatgcacctgttcctgtccttcatgctgcgcgccgtgagcatcttcgtcaaggacgctgtgctctactctggcgccacgcttgatgaggctgagcgcctcaccgaggaggagctgcgcgccatcgcccaggcgcccccgccgcctgccaccgccgctgccggctacgcgggctgcagggtggctgtgaccttcttcctttacttcctggccaccaactactactggattctggtggaggggctgtacctgcacagcctcatcttcatggccttcttctcagagaagaagtacctgtggggcttcacagtcttcggctggggtctgcccgctgtcttcgtggctgtgtgggtcagtgtcagagctaccctggccaacaccgggtgctgggacttgagctccgggaacaaaaagtggatcatccaggtgcccatcctggcctccattgtgctcaacttcatcctcttcatcaatatcgtccgggtgctcgccaccaagctgcgggagaccaacgccggccggtgtgacacacggcagcagtaccggaagctgctcaaatccacgctggtgctcatgcccctctttggcgtccactacattgtcttcatggccacaccatacaccgaggtctcagggacgctctggcaagtccagatgcactatgagatgctcttcaactccttccagggattttttgtcgcaatcatatactgtttctgcaatggcgaggtacaagctgagatcaagaaatcttggagccgctggacactggcactggacttcaagcgaaaggcacgcagcgggagcagcagctatagctacggccccatggtgtcccacacaagtgtgaccaatgtcggcccccgtgtgggactcggcctgcccctcagcccccgcctactgcccactgccaccaccaacggccaccctcagctgcctggccatgccaagccagggaccccagccctggagaccctcgagaccacaccacctgccatggctgctcccaaggacgatgggttcctcaacggctcctgctcaggcctggacgaggaggcctctgggcctgagcggccacctgccctgctacaggaagagtgggagacagtcatgtgaccaggcgctgggggctggacctgctgacatagtggatggacagatggaccaaaagatgggtggttgaatgatttcccactcagggctggggccaagaggaaaaacagggaaaaaaagaaaaaaaaaagaaaaaggaaaaggaa

SEQ ID NO: 19 - DNA, 2289 bp, Homo sapiens
agtaggacccaggggccgggaggcgccggcagagggaggggccgggggccggggaggttttgagggaggtctttggctttttttggcggagctggggcgccctccggaagcgtttccaactttccagaagtttctcgggacgggcaggagggggtggggactgccatatatagatcccgggagcaggggagcgggctaagagtagaatcgtgtcgcggctcgagagcgagagtcacgtcccggcgctagcccagcccgacccaggcccaccgtggtgcacgcaaaccacttcctggccatgcgctccctcctgcttctcagcgccttctgcctcctggaggcggccctggccgccgaggtgaagaaacctgcagccgcagcagctcctggcactgcggagaagttgagccccaaggcggccacgcttgccgagcgcagcgccggcctggccttcagcttgtaccaggccatggccaaggaccaggcagtggagaacatcctggtgtcacccgtggtggtggcctcgtcgctagggctcgtgtcgctgggcggcaaggcgaccacggcgtcgcaggccaaggcagtgctgagcgccgagcagctgcgcgacgaggaggtgcacgccggcctgggcgagctgctgcgctcactcagcaactccacggcgcgcaacgtgacctggaagctgggcagccgactgtacggacccagctcagtgagcttcgctgatgacttcgtgcgcagcagcaagcagcactacaactgcgagcactccaagatcaacttccgcgacaagcgcagcgcgctgcagtccatcaacgagtgggccgcgcagaccaccgacggcaagctgcccgaggtcaccaaggacgtggagcgcacggacggcgccctgctagtcaacgccatgttcttcaagccacactgggatgagaaattccaccacaagatggtggacaaccgtggcttcatggtgactcggtcctataccgtgggtgtcatgatgatgcaccggacaggcctctacaactactacgacgacgagaaggaaaagctgcaaatcgtggagatgcccctggcccacaagctctccagcctcatcatcctcatgccccatcacgtggagcctctcgagcgccttgaaaagctgctaaccaaagagcagctgaagatctggatggggaagatgcagaagaaggctgttgccatctccttgcccaagggtgtggtggaggtgacccatgacctgcagaaacacctggctgggctgggcctgactgaggccattgacaagaacaaggccgacttgtcacgcatgtcaggcaagaaggacctgtacctggccagcgtgttccacgccaccgcctttgagttggacacagatggcaacccctttgaccaggacatctacgggcgcgaggagctgcgcagccccaagctgttctacgccgaccaccccttcatcttcctagtgcgggacacccaaagcggctccctgctattcattgggcgcctggtccggcctaagggtgacaagatgcgagacgagttatagggcctcagggtgcacacaggatggcaggaggcatccaaaggctcctgagacacatgggtgctattggggttgggggggaggtgaggtaccagccttggatactccatggggtgggggtggaaaaacagaccggggttcccgtgtgcctgagcggaccttcccagctagaattcactccacttggacatgggccccagataccatgatgctgagcccggaaactccacatcctgtgggacctgggccatagtcattctgcctgccctgaaagtcccagatcaagcctgcctcaatcagtattcatatttatagccaggtaccttctcacctgtgagaccaaattgagctaggggggtcagccagccctcttctgacactaaaacacctcagctgcctccccagctctatcccaacctctcccaactataaaactaggtgctgcagcccctgggaccaggcacccccagaatgacctggccgcagtgaggcggattgagaaggagctcccaggaggggcttctgggcagactctggtcaagaagcatcgtgtctggcgttgtggggatgaactttttgttttgtttcttccttttttagttcttcaaagatagggagggaagggggaacatgagcctttgttgctatcaatccaagaacttatttgtacattttttttttcaataaaacttttccaatgacattttgttggagcgtggaagaaaaaaaaaaaaaaa

SEQ ID NO: 20 - DNA, 2180 bp, Homo sapiens
agttcgtaaaggagccgggtgacttcagaggcgccggcccgtccgtctgccgcacctgagcacggcccctgcccgagcctggcccgccgcgatgctgtagggaccgccgtgtcctcccgccggaccgttatccgcgccgggcgcccgccagacccgctggcaagatgccgcgctccttcctggtcaagaagcatttcaacgcctccaaaaagccaaactacagcgaactggacacacatacagtgattatttccccgtatctctatgagagttactccatgcctgtcataccacaaccagagatcctcagctcaggagcatacagccccatcactgtgtggactaccgctgctccattccacgcccagctacccaatggcctctctcctctttccggatactcctcatctttggggcgagtgagtccccctcctccatctgacacctcctccaaggaccacagtggctcagaaagccccattagtgatgaagaggaaagactacagtccaagctttcagacccccatgccattgaagctgaaaagtttcagtgcaatttatgcaataagacctattcaactttttctgggctggccaaacataagcagctgcactgcgatgcccagtctagaaaatctttcagctgtaaatactgtgacaaggaatatgtgagcctgggcgccctgaagatgcatattcggacccacacattaccttgtgtttgcaagatctgcggcaaggcgttttccagaccctggttgcttcaaggacacattagaactcacacgggggagaagcctttttcttgccctcactgcaacagagcatttgcagacaggtcaaatctgagggctcatctgcagacccattctgatgtaaagaaataccagtgcaaaaactgctccaaaaccttctccagaatgtctctcctgcacaaacatgaggaatctggctgctgtgtagcacactgagtgacgcaatcaatgtttactcgaacagaatgcatttcttcactccgaagccaaatgacaaataaagtccaaaggcattttctcctgtgctgaccaaccaaataatatgtatagacacacacacatatgcacacacacacacacacacccacagagagagagctgcaagagcatggaattcatgtgtttaaagataatcctttccatgtgaagtttaaaattactatatatttgctgatggctagattgagagaataaaagacagtaacctttctcttcaaagataaaatgaaaagcacattgcatcttttcttcctaaaaaaatgcaaagatttacattgctgccaaatcatttcaactgaaaagaacagtattgctttgtaatagagtctgtaataggatttcccataggaagagatctgccagacgcgaactcaggtgccttaaaaagtattccaagtttactccattacatgtcggttgtctggttgccattgttgaactaaagcctttttttgattacctgtagtgctttaaagtatatttttaaaagggaggaaaaaaataacaagaacaaaacacaggagaatgtattaaaagtatttttgttttgttttgtttttgccaattaacagtatgtgccttgggggaggagggaaagattagctttgaacattcctggcgcatgctccattgtcttactattttaaaacattttaataatttttgaaaattaattaaagatgggaataagtgcaaaagaggattcttacaaattcattaatgtacttaaactatttcaaatgcataccacaaatgcaataatacaataccccttccaagtgcctttttaaattgtatagttgatgagtcaatgtaaatttgtgtttatttttatatgattgaatgagttctgtatgaaactgagatgttgtctatagctatgtctataaacaacctgaagacttgtgaaatcaatgtttcttttttaaaaaacaattttcaagttttttttacaataaacagttttgatttaaaatctcgtttgtatactattttcagagactttacttgcttcatgattagtaccaaaccactgtacaaagaattgtttgttaacaagaaaaaaatgaataatgcttattatgcatctgaagtgttattttatgtgttagattataataaagtaagctgctagtattattttta

SEQ ID NO: 21 - DNA, 4240 bp, Homo sapiens
agacccccttaagttggaggaggcagaagggcaacaacggcggggaaggagaagtcaagacgtctggaaagaattacccagtcctggcttcgagcagcccattgaaccagagacttgaaacagccccagccaaagacttttctcccaattctgcgcttcctgggttctgctgagtcttccacaggctttttttttttttttttttttttttaagacgaaaaagagattttctgttatcgggggcagaaagactgaagcccaaaaaaaaaaaaaaaaaaaaaagaaaagaaaagaaaaaagaaaagttaatttatttttaaagcataatttttttaagaattagactgaagtgcaacggaaacataaagagaatattagtgaaattattttttaaagtggggaagaatcaaacatttaagactcccctatcctttttaaatgttgtttttaaatttcttattttttttggccggtcgtctcaaattcatctgatctcttattacctcaattttggaaactgcccgccaccgaccctccgggaccacacagacaggctgaggacgactttatgaccaagagctgaacaagatgcattgtgagaggtttctatgtatcctgagaataattggaaccacactctttggagtctctctcctccttggaatcacagctgcttatattgttggctaccagtttatccaaacggataattactatttctcttttggactgtatggtgcctttttggcatcacacctcatcatccaaagcctgtttgcctttttggagcaccgaaaaatgaaaaaatccctagaaacccccataaagttgaacaaaacagttgccctttgcatcgctgcctatcaagaagatccagactacttaaggaaatgtttgcaatctgtgaaaaggctaacctaccctgggattaaagttgtcatggtcatagatgggaactcagaagatgacctttacatgatggacatcttcagtgaagtcatgggcagagacaaatcagccacttatatctggaagaacaacttccacgaaaagggtcccggtgagacagatgagtcacataaagaaagctcgcaacacgtaacgcaattggtcttgtccaacaaaagtatctgcatcatgcaaaaatggggtggaaaaagagaagtcatgtacacagccttcagagcactgggacgaagtgtggattatgtacaggtttgtgattcagacactatgcttgacccagcctcatctgtggagatggtaaaagttttagaagaagatcccatggttggaggtgttgggggagatgtccagattttaaacaagtacgattcctggatctcattcctcagcagtgtaagatattggatggcttttaatatagaaagggcctgtcagtcttattttgggtgtgttcagtgcattagtggacctctgggaatgtacagaaactccttgttgcatgagtttgtggaagattggtacaatcaagaatttatgggcaaccaatgtagctttggtgatgacaggcatctcacgaaccgggtgctgagcctgggctatgcaacaaaatacacagctcgatctaagtgccttactgaaacacctatagaatatctcagatggctaaaccagcagacccgttggagcaagtcctacttccgagaatggctgtacaatgcaatgtggtttcacaaacatcacttgtggatgacctacgaagcgattatcactggattctttcctttctttctcattgccacagtaatccagctcttctaccggggtaaaatttggaacattctcctcttcttgttaactgtccagctagtaggtctcataaaatcatcttttgccagctgccttagaggaaatatcgtcatggtcttcatgtctctctactcagtgttatacatgtcgagtttacttcccgccaagatgtttgcaattgcaacaataaacaaagctgggtggggcacatcaggaaggaaaaccattgttgttaatttcataggactcattccagtatcagtttggtttacaatcctcctgggtggtgtgattttcaccatttataaggagtctaaaaggccattttcagaatccaaacagacagttctaattgttggaacgttgctctatgcatgctattgggtcatgcttttgacgctgtatgtagttctcatcaataagtgtggcaggcggaagaagggacaacaatatgacatggtgcttgatgtatgatcttccatgttttgacgtttgcagtcacacacaacaccttagttcctctaggggctgtacagtattgtggcatcagataatgccaccaaaggagacatatcactgctgctgggacttgaacaaagacatttatatgggtttattttcattctgccaaagtaaaacaatacatcaacaagaagaaactcagatttaacctgttatttctatgaaaatgggatgaattctttgtttatgcactttttccttactgtgcatccgcctgaaagtgttttgccctatatacctcactagccatgctttatgtgggttatcatggaagaaaaggattttggaaactcaaggaaaagttctttcaacctatacaacctaacttatggactgttttgatagatgataattttttttttttaggaaggattttctttttaactttaccaaatgaaatgccaaaggaagttttaaaggccgttggctgtgctgtattttgatataattgtactgtgtttttaaattttgtatgccaatcttaaagacaaattttgcatattctctattttacttttctgccaaaataaacctgttcttccttttttaaaataaaataagttcttaaaaaatttatacttaaaaaatcctgcccaaaatgtgaagcttggttgactgatgttcatgatagaaagaataaaatgtttctctctctctaccttttaaaattgaatagtttatttctgtgaaagaagtatttaaactttcaatattttaactttttgtttttatttcttttagaaaaggccaatatacctatcacactttggaagtaaaaatacacactttcgtgtgtacctaaaaaaaaaatcgttgaaaatcaaggccaaaggtagtgcaattttttcattaagatttaaaaaaaagggaatgatagtctttgaaagaaaacagtaggcatccagcactggacaaaacatgggtatcaaagatgaataatctttggagattctggcagtgttttcccagaacaagtcaagtggaaagtggagaaattatctgtataattttggacacatacaatgcagtttatcaaaggttttgttctgtggcctgaatttactgggtcctacctacacattgaacatgttttgcctgtcttttttttttttttcaacttgccagttcactttacatgttagtataatgtttacacgggtgagttggataaattataaaacatataaattcaaaattggcagatagaatcaccaagtatctatcctcttttactttcaaatgaggaattttgtttttctgaattacacagatcatcacttcctatttcctgttctggacctgtataaaaatgtctacacagtagaagtgacatcaaggtttaataagtatatcaatgattggcacatataaaaattgttgaaccacatactctgaacttggctaatttagttactgcaaggcctccattatccagttttattttttacacgattgaccttgccttgtagctggtgctgtgtagacctgtgttgaaaacacaatcggaatatatgaataattgaataaacagcattatggtgaggcagagacacatggagaagtgttaaaaaaaaaatgggcttcctgcctttctgcctcttttttatgcagtcatctatgttacatctatcctgcctaagaaaaagctgcacatcctaccttcagagtacaaaaaggtacatctgagactcaagactctcactgattggagagcttgtggaaaacaaaacacaccatgccaataaatgagatgaaaacttgagtttgcctttttaactatttatgttctaagttaagctttgataacattcaaatgtcaaattctctcattcttataaaaagttgaattaattgcctgtatttattttagcaattattcaatgtatttccagtataggatgtatagtataattaattttttgtaaataaaatatttttgataaga

SEQ ID NO: 22 - DNA, 1192 bp, Homo sapiens
attccacatcaggagcgtttttggagaaagctgcactctgttgagctccagggcgcagtggagggagggagtgaaggagctctctgtacccaaggaaagtgcagctgagactcagacaagattacaatgaaccaactcagcttcctgctgtttctcatagcgaccaccagaggatggagtacagatgaggctaatacttacttcaaggaatggacctgttcttcgtctccatctctgcccagaagctgcaaggaaatcaaagacgaatgtcctagtgcatttgatggcctgtattttctccgcactgagaatggtgttatctaccagaccttctgtgacatgacctctgggggtggcggctggaccctggtggccagcgtgcacgagaatgacatgcgtgggaagtgcacggtgggcgatcgctggtccagtcagcagggcagcaaagcagtctacccagagggggacggcaactgggccaactacaacacctttggatctgcagaggcggccacgagcgatgactacaagaaccctggctactacgacatccaggccaaggacctgggcatctggcacgtgcccaataagtcccccatgcagcactggagaaacagctccctgctgaggtaccgcacggacactggcttcctccagacactgggacataatctgtttggcatctaccagaaatatccagtgaaatatggagaaggaaagtgttggactgacaacggcccggtgatccctgtggtctatgattttggcgacgcccagaaaacagcatcttattactcaccctatggccagcgggaattcactgcgggatttgttcagttcagggtatttaataacgagagagcagccaacgccttgtgtgctggaatgagggtcaccggatgtaacactgagcaccactgcattggtggaggaggatactttccagaggccagtccccagcagtgtggagatttttctggttttgattggagtggatatggaactcatgttggttacagcagcagccgtgagataactgaggcagctgtgcttctattctatcgttgagagttttgtgggagggaacccagacctctcctcccaaccatgagatcccaaggatggagaacaacttacccagtagctagaatgttaatggcagaagagaaaacaataaatcatattgactcaa

SEQ ID NO: 23 - DNA, 4265 bp, Homo sapiens
atttagaccagcccggctgtatccacggcaacagaagcaggagtgtcactggccgccagatcactgagggtcccacaatgtggcccgggctgtgatttacctgggtgagacagcttgagccccatcgtggattccaagacatccctgctgagagagccaaggtgcaatgtagcaggacaactcatggagcccccccgggcccatcgagtaccggactggctgaccccctagggttggcagtagcccctgaccctcagtatggccaacactaccggagagcctgaggaggtgagcggcgctctgtccccaccgtccgcatcagcttatgtgaagctggtactgctgggactgattatgtgcgtgagcctggcgggtaacgccatcttgtccctgctggtgctcaaggagcgtgccctgcacaaggctccttactacttcctgctggacctgtgcctggccgatggcatacgctctgccgtctgcttcccctttgtgctggcttctgtgcgccacggctcttcatggaccttcagtgcactcagctgcaagattgtggcctttatggccgtgctcttttgcttccatgcggccttcatgctgttctgcatcagcgtcacccgctacatggccatcgcccaccaccgcttctacgccaagcgcatgacactctggacatgcgcggctgtcatctgcatggcctggaccctgtctgtggccatggccttcccacctgtctttgacgtgggcacctacaagtttattcgggaggaggaccagtgcatctttgagcatcgctacttcaaggccaatgacacgctgggcttcatgcttatgttggctgtgctcatggcagctacccatgctgtctacggcaagctgctcctcttcgagtatcgtcaccgcaagatgaagccagtgcagatggtgccagccatcagccagaactggacattccatggtcccggggccaccggccaggctgctgccaactggatcgccggctttggccgtgggcccatgccaccaaccctgctgggtatccggcagaatgggcatgcagccagccggcggctactgggcatggacgaggtcaagggtgaaaagcagctgggccgcatgttctacgcgatcacactgctctttctgctcctctggtcaccctacatcgtggcctgctactggcgagtgtttgtgaaagcctgtgctgtgccccaccgctacctggccactgctgtttggatgagcttcgcccaggctgccgtcaacccaattgtctgcttcctgctcaacaaggacctcaagaagtgcctgaggactcacgccccctgctggggcacaggaggtgccccggctcccagagaaccctactgtgtcatgtgaagcaggctggtaggcagacaggcagagagaaggtcatggccaccgtgatggggccaacagcaagggaggggtaggggcccatacaggagtcctcctttctgagctccagccccagcccctcgaaccacctgtaatctaggcacctttgccaacacctcccaaggatggaggactgggcgagggactgggaaagaggcatatttagttttgtggggcctgtctccgctgcctccttctccacttctacaatctcattctctctctctctctctctgtctctctctctctctctctctctctctcagaagtgacaattcagaaaaagaaaagaacactgagaatgcaggtttttctactaacagctgaggagacaggctttcttactttaatgtctctccttctgacactgtccagaagggggaatttgtcctgtaaaatagacttccagagctcttttgccccctctgctcccatgcaccctccccttccaagtcctttagcaaggcctggatgtttagggagaaagtggtccaaggctgctgacaagagggaccaaagggggtgctgggttcccagggagcagggatgtttaattactatgtcatgtgcaatgttgttttaggccaacccttgccccaagcccagtctcttctccctccccaccatgtccagacctcccaaatggttcttgtgcatctgttggagaagtcaagggagtagggagaagggccccaaggatgggcccaggttaggtgaagagtaagatgtgagctgaactcctcgaactgaagagacccacacttggtcacattctctcacgctgccttcaggatccccagcccccaactcttcttcctgaggatggaaatccactccagccccactaggactgatgtgggtgccatacaggcaggagcagcccaccaggaaagtgtaaggagggagctgaactccccagagtagctggaccacagagacttgggtcagagctgatttcaaccccagaattgtctctcgggttcaccctactcttctgaagatgaaaatttgtttggggccttggtaaccgatagcggtacaaactccaaggcactgtggacttgagtccattcctatctgacctctttttgtccccctcaagcctcaggggcctcaagcccctccttagtagcccttggctgactgggccctgagccccaagcatccttctttcccaacaaccctccttccccatccttcccccacccttacctacacccaaagtggagcacactgcagtcagattctccaggagggagatccaagcctcctcccaggggtggagtccactctgggcttactttgaggcctgttctgtggattggtgagccaagctggcactccttgccctggtcttacccaggctctctgtccccctctcacttcctgtggggccggaatctgtatttatccatccccctttcccttctttatagaagtccctgtcctaaactccctccctagcccaagagagccccagaactggggaagcctgacccatacagaatggggagggcactctaggcaggagagacattaatgagcctggctgcagagtggccctggaaaggcaggccagagtggctgagaggctgggagtaggggagcctgttctctcagcgatagtgatgggggtgcctttccgagggggtggggtgggaagaccaagggggtggggggtagatagggtacatttaggagggttttcctccatttcttttttctaactgcctggattcaccattggattttgtaaatggaaaaactgaaatgaacaatgctatactggatgttttctctttctgactgtgtgtgtgtgtgtgcgtgcgtgcgtgcatgtgccctgtctgaccacatgtggagagacatgattgagtgatagtgtgtgtctgtgtgactttgtgtggggaggcactcctgaagaaaacttgcccggtgcacacacgtaaaatgcctgtatatggggacagatacagcacgtgcatgcatacacacacacacacacacaccacagttgagaggagacaaactagagtatgtgcccgtggtaggaagtcgagtggtcaagagatggatcttggaaactacataggtcggtagcaagagggtagactcccatctcacaagatgggcctcccttggcccaggccctgagcacgggagggctggggccgccagggaacttgaaaacctcatctcctcacaaagcctgtagccccatctcaaccccgtctcagtctccttcccaaactcaaacaaggtgttcctaaaattggaccaccatggagaatggggactgggaattgaggatcaaatgtgagggaaactgatgaggttaggaaatgccccccacaaagtaatggcttctggagggactgctcagtctgggatgggagcccttcctaggggccactgtatgcagctgggactttggtcagctttgaccaaatttagagggagggatgtcatggggaaaaaaaacccaagcccaggagtctacccagccagcctgctccctagacagttaatttactatctggttattctctcaggtgcacagaattgagttgaccatactcctcagttcttggcacactatatcatcattggtccatgtgaggcccttttatttttttttcttcagttttgtccccttcatcacccattcctgatcccatcctccccgccccctacacaggcacccactctcgtgtatttaacgtacgtccttccaatccaccgttcatgtgtttatttacatatatgtgtatctgtgaaaaatgtatggtattgctgtgtgttttaatttacataaacagtattgtactataaaaaaaaaaaaaaaa

SEQ ID NO: 24 - DNA, 752 bp, Homo sapiens
cttctgtctaggcagagctctgcaaggagaggttgtgtcttcgttctttccgccatcttcgttctttccaacatcttcgttctttctcactgaccgagactcagccggtaggtctgcagagtggtcttcctggtaatttagttgtgagtgaatgtgtggaggagccagcgggcttaggacaggtcccgtggcacagtccgtggctttgagggaaaagggcctcgcggtggtcctccgccttcccccaggtcctgatgcaggcgccatgggccggtaatcgtggctgggctggaacgagggaggaagtgagagatatgagtgagcatgtaacaagatcccaatcctcagaaagaggaaatgaccaagagtcttcccagccagttggacctgtgattgtccagcagcccactgaggaaaaacgtcaagaagaggaaccaccaactgataatcagggtattgcacctagtggggagatcaaaaatgaaggagcacctgctgttcaagggactgatgtggaagcttttcaacaggaactggctctgcttaagatagaggatgcacctggagatggtcctgatgtcagggaggggactctgcccacttttgatcccactaaagtgctggaagcaggtgaagggcaactataggtttaaaccaagacaaatgaagactgaaaccaagaatattgttcttatgctggaaatttgactgctaacattctcttaataaagttttacagttttctgcaaaga

SEQ ID NO: 25 - DNA, 8467 bp, Homo sapiens
gcccgcgccggctgtgctgcacagggggaggagagggaaccccaggcgcgagcgggaagaggggacctgcagccacaacttctctggtcctctgcatcccttctgtccctccacccgtccccttccccaccctctggcccccaccttcttggaggcgacaacccccgggaggcattagaagggatttttcccgcaggttgcgaagggaagcaaacttggtggcaacttgcctcccggtgcgggcgtctctcccccaccgtctcaacatgcttaggggtccggggcccgggctgctgctgctggccgtccagtgcctggggacagcggtgccctccacgggagcctcgaagagcaagaggcaggctcagcaaatggttcagccccagtccccggtggctgtcagtcaaagcaagcccggttgttatgacaatggaaaacactatcagataaatcaacagtgggagcggacctacctaggcaatgcgttggtttgtacttgttatggaggaagccgaggttttaactgcgagagtaaacctgaagctgaagagacttgctttgacaagtacactgggaacacttaccgagtgggtgacacttatgagcgtcctaaagactccatgatctgggactgtacctgcatcggggctgggcgagggagaataagctgtaccatcgcaaaccgctgccatgaagggggtcagtcctacaagattggtgacacctggaggagaccacatgagactggtggttacatgttagagtgtgtgtgtcttggtaatggaaaaggagaatggacctgcaagcccatagctgagaagtgttttgatcatgctgctgggacttcctatgtggtcggagaaacgtgggagaagccctaccaaggctggatgatggtagattgtacttgcctgggagaaggcagcggacgcatcacttgcacttctagaaatagatgcaacgatcaggacacaaggacatcctatagaattggagacacctggagcaagaaggataatcgaggaaacctgctccagtgcatctgcacaggcaacggccgaggagagtggaagtgtgagaggcacacctctgtgcagaccacatcgagcggatctggccccttcaccgatgttcgtgcagctgtttaccaaccgcagcctcacccccagcctcctccctatggccactgtgtcacagacagtggtgtggtctactctgtggggatgcagtggctgaagacacaaggaaataagcaaatgctttgcacgtgcctgggcaacggagtcagctgccaagagacagctgtaacccagacttacggtggcaactcaaatggagagccatgtgtcttaccattcacctacaatggcaggacgttctactcctgcaccacagaagggcgacaggacggacatctttggtgcagcacaacttcgaattatgagcaggaccagaaatactctttctgcacagaccacactgttttggttcagactcgaggaggaaattccaatggtgccttgtgccacttccccttcctatacaacaaccacaattacactgattgcacttctgagggcagaagagacaacatgaagtggtgtgggaccacacagaactatgatgccgaccagaagtttgggttctgccccatggctgcccacgaggaaatctgcacaaccaatgaaggggtcatgtaccgcattggagatcagtgggataagcagcatgacatgggtcacatgatgaggtgcacgtgtgttgggaatggtcgtggggaatggacatgcattgcctactcgcagcttcgagatcagtgcattgttgatgacatcacttacaatgtgaacgacacattccacaagcgtcatgaagaggggcacatgctgaactgtacatgcttcggtcagggtcggggcaggtggaagtgtgatcccgtcgaccaatgccaggattcagagactgggacgttttatcaaattggagattcatgggagaagtatgtgcatggtgtcagataccagtgctactgctatggccgtggcattggggagtggcattgccaacctttacagacctatccaagctcaagtggtcctgtcgaagtatttatcactgagactccgagtcagcccaactcccaccccatccagtggaatgcaccacagccatctcacatttccaagtacattctcaggtggagacctaaaaattctgtaggccgttggaaggaagctaccataccaggccacttaaactcctacaccatcaaaggcctgaagcctggtgtggtatacgagggccagctcatcagcatccagcagtacggccaccaagaagtgactcgctttgacttcaccaccaccagcaccagcacacctgtgaccagcaacaccgtgacaggagagacgactcccttttctcctcttgtggccacttctgaatctgtgaccgaaatcacagccagtagctttgtggtctcctgggtctcagcttccgacaccgtgtcgggattccgggtggaatatgagctgagtgaggagggagatgagccacagtacctggatcttccaagcacagccacttctgtgaacatccctgacctgcttcctggccgaaaatacattgtaaatgtctatcagatatctgaggatggggagcagagtttgatcctgtctacttcacaaacaacagcgcctgatgcccctcctgacccgactgtggaccaagttgatgacacctcaattgttgttcgctggagcagaccccaggctcccatcacagggtacagaatagtctattcgccatcagtagaaggtagcagcacagaactcaaccttcctgaaactgcaaactccgtcaccctcagtgacttgcaacctggtgttcagtataacatcactatctatgctgtggaagaaaatcaagaaagtacacctgttgtcattcaacaagaaaccactggcaccccacgctcagatacagtgccctctcccagggacctgcagtttgtggaagtgacagacgtgaaggtcaccatcatgtggacaccgcctgagagtgcagtgaccggctaccgtgtggatgtgatccccgtcaacctgcctggcgagcacgggcagaggctgcccatcagcaggaacacctttgcagaagtcaccgggctgtcccctggggtcacctattacttcaaagtctttgcagtgagccatgggagggagagcaagcctctgactgctcaacagacaaccaaactggatgctcccactaacctccagtttgtcaatgaaactgattctactgtcctggtgagatggactccacctcgggcccagataacaggataccgactgaccgtgggccttacccgaagaggacagcccaggcagtacaatgtgggtccctctgtctccaagtacccactgaggaatctgcagcctgcatctgagtacaccgtatccctcgtggccataaagggcaaccaagagagccccaaagccactggagtctttaccacactgcagcctgggagctctattccaccttacaacaccgaggtgactgagaccaccattgtgatcacatggacgcctgctccaagaattggttttaagctgggtgtacgaccaagccagggaggagaggcaccacgagaagtgacttcagactcaggaagcatcgttgtgtccggcttgactccaggagtagaatacgtctacaccatccaagtcctgagagatggacaggaaagagatgcgccaattgtaaacaaagtggtgacaccattgtctccaccaacaaacttgcatctggaggcaaaccctgacactggagtgctcacagtctcctgggagaggagcaccaccccagacattactggttatagaattaccacaacccctacaaacggccagcagggaaattctttggaagaagtggtccatgctgatcagagctcctgcacttttgataacctgagtcccggcctggagtacaatgtcagtgtttacactgtcaaggatgacaaggaaagtgtccctatctctgataccatcatcccagctgttcctcctcccactgacctgcgattcaccaacattggtccagacaccatgcgtgtcacctgggctccacccccatccattgatttaaccaacttcctggtgcgttactcacctgtgaaaaatgaggaagatgttgcagagttgtcaatttctccttcagacaatgcagtggtcttaacaaatctcctgcctggtacagaatatgtagtgagtgtctccagtgtctacgaacaacatgagagcacacctcttagaggaagacagaaaacaggtcttgattccccaactggcattgacttttctgatattactgccaactcttttactgtgcactggattgctcctcgagccaccatcactggctacaggatccgccatcatcccgagcacttcagtgggagacctcgagaagatcgggtgccccactctcggaattccatcaccctcaccaacctcactccaggcacagagtatgtggtcagcatcgttgctcttaatggcagagaggaaagtcccttattgattggccaacaatcaacagtttctgatgttccgagggacctggaagttgttgctgcgacccccaccagcctactgatcagctgggatgctcctgctgtcacagtgagatattacaggatcacttacggagagacaggaggaaatagccctgtccaggagttcactgtgcctgggagcaagtctacagctaccatcagcggccttaaacctggagttgattataccatcactgtgtatgctgtcactggccgtggagacagccccgcaagcagcaagccaatttccattaattaccgaacagaaattgacaaaccatcccagatgcaagtgaccgatgttcaggacaacagcattagtgtcaagtggctgccttcaagttcccctgttactggttacagagtaaccaccactcccaaaaatggaccaggaccaacaaaaactaaaactgcaggtccagatcaaacagaaatgactattgaaggcttgcagcccacagtggagtatgtggttagtgtctatgctcagaatccaagcggagagagtcagcctctggttcagactgcagtaaccaacattgatcgccctaaaggactggcattcactgatgtggatgtcgattccatcaaaattgcttgggaaagcccacaggggcaagtttccaggtacagggtgacctactcgagccctgaggatggaatccatgagctattccctgcacctgatggtgaagaagacactgcagagctgcaaggcctcagaccgggttctgagtacacagtcagtgtggttgccttgcacgatgatatggagagccagcccctgattggaacccagtccacagctattcctgcaccaactgacctgaagttcactcaggtcacacccacaagcctgagcgcccagtggacaccacccaatgttcagctcactggatatcgagtgcgggtgacccccaaggagaagaccggaccaatgaaagaaatcaaccttgctcctgacagctcatccgtggttgtatcaggacttatggtggccaccaaatatgaagtgagtgtctatgctcttaaggacactttgacaagcagaccagctcagggagttgtcaccactctggagaatgtcagcccaccaagaagggctcgtgtgacagatgctactgagaccaccatcaccattagctggagaaccaagactgagacgatcactggcttccaagttgatgccgttccagccaatggccagactccaatccagagaaccatcaagccagatgtcagaagctacaccatcacaggtttacaaccaggcactgactacaagatctacctgtacaccttgaatgacaatgctcggagctcccctgtggtcatcgacgcctccactgccattgatgcaccatccaacctgcgtttcctggccaccacacccaattccttgctggtatcatggcagccgccacgtgccaggattaccggctacatcatcaagtatgagaagcctgggtctcctcccagagaagtggtccctcggccccgccctggtgtcacagaggctactattactggcctggaaccgggaaccgaatatacaatttatgtcattgccctgaagaataatcagaagagcgagcccctgattggaaggaaaaagacagacgagcttccccaactggtaacccttccacaccccaatcttcatggaccagagatcttggatgttccttccacagttcaaaagacccctttcgtcacccaccctgggtatgacactggaaatggtattcagcttcctggcacttctggtcagcaacccagtgttgggcaacaaatgatctttgaggaacatggttttaggcggaccacaccgcccacaacggccacccccataaggcataggccaagaccatacccgccgaatgtaggacaagaagctctctctcagacaaccatctcatgggccccattccaggacacttctgagtacatcatttcatgtcatcctgttggcactgatgaagaacccttacagttcagggttcctggaacttctaccagtgccactctgacaggcctcaccagaggtgccacctacaacatcatagtggaggcactgaaagaccagcagaggcataaggttcgggaagaggttgttaccgtgggcaactctgtcaacgaaggcttgaaccaacctacggatgactcgtgctttgacccctacacagtttcccattatgccgttggagatgagtgggaacgaatgtctgaatcaggctttaaactgttgtgccagtgcttaggctttggaagtggtcatttcagatgtgattcatctagatggtgccatgacaatggtgtgaactacaagattggagagaagtgggaccgtcagggagaaaatggccagatgatgagctgcacatgtcttgggaacggaaaaggagaattcaagtgtgaccctcatgaggcaacgtgttatgatgatgggaagacataccacgtaggagaacagtggcagaaggaatatctcggtgccatttgctcctgcacatgctttggaggccagcggggctggcgctgtgacaactgccgcagacctgggggtgaacccagtcccgaaggcactactggccagtcctacaaccagtattctcagagataccatcagagaacaaacactaatgttaattgcccaattgagtgcttcatgcctttagatgtacaggctgacagagaagattcccgagagtaaatcatctttccaatccagaggaacaagcatgtctctctgccaagatccatctaaactggagtgatgttagcagacccagcttagagttcttctttctttcttaagccctttgctctggaggaagttctccagcttcagctcaactcacagcttctccaagcatcaccctgggagtttcctgagggttttctcataaatgagggctgcacattgcctgttctgcttcgaagtattcaataccgctcagtattttaaatgaagtgattctaagatttggtttgggatcaataggaaagcatatgcagccaaccaagatgcaaatgttttgaaatgatatgaccaaaattttaagtaggaaagtcacccaaacacttctgctttcacttaagtgtctggcccgcaatactgtaggaacaagcatgatcttgttactgtgatattttaaatatccacagtactcactttttccaaatgatcctagtaattgcctagaaatatctttctcttacctgttatttatcaatttttcccagtatttttatacggaaaaaattgtattgaaaacacttagtatgcagttgataagaggaatttggtataattatggtgggtgattattttttatactgtatgtgccaaagctttactactgtggaaagacaactgttttaataaaagatttacattccacaacttgaagttcatctatttgatataagacaccttcgggggaaataattcctgtgaatattctttttcaattcagcaaacatttgaaaatctatgatgtgcaagtctaattgttgatttcagtacaagattttctaaatcagttgctacaaaaactgattggtttttgtcacttcatctcttcactaatggagatagctttacactttctgctttaatagatttaagtggaccccaatatttattaaaattgctagtttaccgttcagaagtataatagaaataatctttagttgctcttttctaaccattgtaattcttcccttcttccctccacctttccttcattgaataaacctctgttcaaagagattgcctgcaagggaaataaaaatgactaagatattaaaagtatttgaatagtaaaaaaaaaaaaaaaaaaa

SEQ ID NO: 26 - DNA, 2974 bp, Homo sapiens
gtgtgcgtgatggagaaaattgggcaccagggctgctcccgagattctcagatctgatttccacgcttgctaccaaaatagtctgggcaggccacttttggaagtaggcgttatctagtgagcaggcggccgctttcgatttcgctttcccctaaatggctgagcttctcgccagcgcaggatcagcctgttcctgggactttccgagagccccgccctcgttccctcccccagccgccagtaggggaggactcggcggtacccggagcttcaggccccaccggggcgcggagagtcccaggcccggccgggaccgggacggcgtccgagtgccaatggctagctctaggtgtcccgctccccgcgggtgccgctgcctccccggagcttctctcgcatggctggggacagtactgctacttctcgccgactgggtgctgctccggaccgcgctgccccgcatattctccctgctggtgcccaccgcgctgccactgctccgggtctgggcggtgggcctgagccgctgggccgtgctctggctgggggcctgcggggtcctcagggcaacggttggctccaagagcgaaaacgcaggtgcccagggctggctggctgctttgaagccattagctgcggcactgggcttggccctgccgggacttgccttgttccgagagctgatctcatggggagcccccgggtccgcggatagcaccaggctactgcactggggaagtcaccctaccgccttcgttgtcagttatgcagcggcactgcccgcagcagccctgtggcacaaactcgggagcctctgggtgcccggcggtcagggcggctctggaaaccctgtgcgtcggcttctaggctgcctgggctcggagacgcgccgcctctcgctgttcctggtcctggtggtcctctcctctcttggggagatggccattccattctttacgggccgcctcactgactggattctacaagatggctcagccgataccttcactcgaaacttaactctcatgtccattctcaccatagccagtgcagtgctggagttcgtgggtgacgggatctataacaacaccatgggccacgtgcacagccacttgcagggagaggtgtttggggctgtcctgcgccaggagacggagtttttccaacagaaccagacaggtaacatcatgtctcgggtaacagaggacacgtccaccctgagtgattctctgagtgagaatctgagcttatttctgtggtacctggtgcgaggcctatgtctcttggggatcatgctctggggatcagtgtccctcaccatggtcaccctgatcaccctgcctctgcttttccttctgcccaagaaggtgggaaaatggtaccagttgctggaagtgcaggtgcgggaatctctggcaaagtccagccaggtggccattgaggctctgtcggccatgcctacagttcgaagctttgccaacgaggagggcgaagcccagaagtttagggaaaagctgcaagaaataaagacactcaaccagaaggaggctgtggcctatgcagtcaactcctggaccactagtatttcaggtatgctgctgaaagtgggaatcctctacattggtgggcagctggtgaccagtggggctgtaagcagtgggaaccttgtcacatttgttctctaccagatgcagttcacccaggctgtggaggtactgctctccatctaccccagagtacagaaggctgtgggctcctcagagaaaatatttgagtacctggaccgcacccctcgctgcccacccagtggtctgttgactcccttacacttggagggccttgtccagttccaagatgtctcctttgcctacccaaaccgcccagatgtcttagtgctacaggggctgacattcaccctacgccctggcgaggtgacggcgctggtgggacccaatgggtctgggaagagcacagtggctgccctgctgcagaatctgtaccagcccaccgggggacagctgctgttggatgggaagccccttccccaatatgagcaccgctacctgcacaggcaggtggctgcagtgggacaagagccacaggtatttggaagaagtcttcaagaaaatattgcctatggcctgacccagaagccaactatggaggaaatcacagctgctgcagtaaagtctggggcccatagtttcatctctggactccctcagggctatgacacagaggtagacgaggctgggagccagctgtcagggggtcagcgacaggcagtggcgttggcccgagcattgatccggaaaccgtgtgtacttatcctggatgatgccaccagtgccctggatgcaaacagccagttacaggtggagcagctcctgtacgaaagccctgagcggtactcccgctcagtgcttctcatcacccagcacctcagcctggtggagcaggctgaccacatcctctttctggaaggaggcgctatccgggaggggggaacccaccagcagctcatggagaaaaaggggtgctactgggccatggtgcaggctcctgcagatgctccagaatgaaagccttctcagacctgcgcactccatctccctcccttttcttctctctgtggtggagaaccacagctgcagagtaggcagctgcctccaggatgagttacttgaaatttgccttgagtgtgttacctcctttccaagctcctcgtgataatgcagacttcctggagtacaaacacaggatttgtaattccttactgtaacggagtttagagccagggctgatgctttggtgtggccagcactctgaaactgagaaatgttcagaatgtacggaaagatgatcagctattttcaacataactgaaggcatatgctggcccataaacaccctgtaggttcttgatatttataataaaattggtgttttgtaaaaaaaaaaaaaaaaaaaaaaa

SEQ ID NO: 27 - DNA, 2336 bp, Homo sapiens
agacacctctgccctcaccatgagcctctggcagcccctggtcctggtgctcctggtgctgggctgctgctttgctgcccccagacagcgccagtccacccttgtgctcttccctggagacctgagaaccaatctcaccgacaggcagctggcagaggaatacctgtaccgctatggttacactcgggtggcagagatgcgtggagagtcgaaatctctggggcctgcgctgctgcttctccagaagcaactgtccctgcccgagaccggtgagctggatagcgccacgctgaaggccatgcgaaccccacggtgcggggtcccagacctgggcagattccaaacctttgagggcgacctcaagtggcaccaccacaacatcacctattggatccaaaactactcggaagacttgccgcgggcggtgattgacgacgcctttgcccgcgccttcgcactgtggagcgcggtgacgccgctcaccttcactcgcgtgtacagccgggacgcagacatcgtcatccagtttggtgtcgcggagcacggagacgggtatcccttcgacgggaaggacgggctcctggcacacgcctttcctcctggccccggcattcagggagacgcccatttcgacgatgacgagttgtggtccctgggcaagggcgtcgtggttccaactcggtttggaaacgcagatggcgcggcctgccacttccccttcatcttcgagggccgctcctactctgcctgcaccaccgacggtcgctccgacggcttgccctggtgcagtaccacggccaactacgacaccgacgaccggtttggcttctgccccagcgagagactctacacccaggacggcaatgctgatgggaaaccctgccagtttccattcatcttccaaggccaatcctactccgcctgcaccacggacggtcgctccgacggctaccgctggtgcgccaccaccgccaactacgaccgggacaagctcttcggcttctgcccgacccgagctgactcgacggtgatggggggcaactcggcgggggagctgtgcgtcttccccttcactttcctgggtaaggagtactcgacctgtaccagcgagggccgcggagatgggcgcctctggtgcgctaccacctcgaactttgacagcgacaagaagtggggcttctgcccggaccaaggatacagtttgttcctcgtggcggcgcatgagttcggccacgcgctgggcttagatcattcctcagtgccggaggcgctcatgtaccctatgtaccgcttcactgaggggccccccttgcataaggacgacgtgaatggcatccggcacctctatggtcctcgccctgaacctgagccacggcctccaaccaccaccacaccgcagcccacggctcccccgacggtctgccccaccggaccccccactgtccacccctcagagcgccccacagctggccccacaggtcccccctcagctggccccacaggtccccccactgctggcccttctacggccactactgtgcctttgagtccggtggacgatgcctgcaacgtgaacatcttcgacgccatcgcggagattgggaaccagctgtatttgttcaaggatgggaagtactggcgattctctgagggcagggggagccggccgcagggccccttccttatcgccgacaagtggcccgcgctgccccgcaagctggactcggtctttgaggagcggctctccaagaagcttttcttcttctctgggcgccaggtgtgggtgtacacaggcgcgtcggtgctgggcccgaggcgtctggacaagctgggcctgggagccgacgtggcccaggtgaccggggccctccggagtggcagggggaagatgctgctgttcagcgggcggcgcctctggaggttcgacgtgaaggcgcagatggtggatccccggagcgccagcgaggtggaccggatgttccccggggtgcctttggacacgcacgacgtcttccagtaccgagagaaagcctatttctgccaggaccgcttctactggcgcgtgagttcccggagtgagttgaaccaggtggaccaagtgggctacgtgacctatgacatcctgcagtgccctgaggactagggctcccgtcctgctttggcagtgccatgtaaatccccactgggaccaaccctggggaaggagccagtttgccggatacaaactggtattctgttctggaggaaagggaggagtggaggtgggctgggccctctcttctcacctttgttttttgttggagtgtttctaataaacttggattctctaaccttta

SEQ ID NO: 28 - DNA, 1240 bp, Homo sapiens
gaaaggcgcattgatgcagcctgcggcggcctcggagcgcggcggagccagacgctgaccacgttcctctcctcggtctcctccgcctccagctccgcgctgcccggcagccgggagccatgcgaccccagggccccgccgcctccccgcagcggctccgcggcctcctgctgctcctgctgctgcagctgcccgcgccgtcgagcgcctctgagatccccaaggggaagcaaaaggcgcagctccggcagagggaggtggtggacctgtataatggaatgtgcttacaagggccagcaggagtgcctggtcgagacgggagccctggggccaatggcattccgggtacacctgggatcccaggtcgggatggattcaaaggagaaaagggggaatgtctgagggaaagctttgaggagtcctggacacccaactacaagcagtgttcatggagttcattgaattatggcatagatcttgggaaaattgcggagtgtacatttacaaagatgcgttcaaatagtgctctaagagttttgttcagtggctcacttcggctaaaatgcagaaatgcatgctgtcagcgttggtatttcacattcaatggagctgaatgttcaggacctcttcccattgaagctataatttatttggaccaaggaagccctgaaatgaattcaacaattaatattcatcgcacttcttctgtggaaggactttgtgaaggaattggtgctggattagtggatgttgctatctgggttggtacttgttcagattacccaaaaggagatgcttctactggatggaattcagtttctcgcatcattattgaagaactaccaaaataaatgctttaattttcatttgctacctctttttttattatgccttggaatggttcacttaaatgacattttaaataagtttatgtatacatctgaatgaaaagcaaagctaaatatgtttacagaccaaagtgtgatttcacactgtttttaaatctagcattattcattttgcttcaatcaaaagtggtttcaatattttttttagttggttagaatactttcttcatagtcacattctctcaacctataatttggaatattgttgtggtcttttgttttttctcttagtatagcatttttaaaaaaatataaaagctaccaatctttgtacaatttgtaaatgttaagaattttttttatatctgttaaataaaaattatttccaacaa

SEQ ID NO: 29 - DNA, 2108 bp, Homo sapiens
ctttcaattcctctggcaacaaaccacacactgggatctgacactgtagagtgctttctcttctctttttttgggggggggagggggtgtggttgcatatttaaactctcacgcatttatgtactgaggactgcagtgtaggactttcctgcagaataccatttgatcctattaagaattgtccaaatgttggagcatttgattgaaaaatccttcttagccattttaaagatagctttccaatgattagacgaattgattctttctgtgactcatcagttcatttcctgtaaaattcatgtcttgctgttgatttgtgaataagaaccagagcttgtagaaaccactttaatcatatccaggagtttgcaagaaacaggtgcttaacactaattcacctcctgaacaagaaaaatgggctgtgaccggaactgtgggctcatcgctggggctgtcattggtgctgtcctggctgtgtttggaggtattctaatgccagttggagacctgcttatccagaagacaattaaaaagcaagttgtcctcgaagaaggtacaattgcttttaaaaattgggttaaaacaggcacagaagtttacagacagttttggatctttgatgtgcaaaatccacaggaagtgatgatgaacagcagcaacattcaagttaagcaaagaggtccttatacgtacagagttcgttttctagccaaggaaaatgtaacccaggacgctgaggacaacacagtctctttcctgcagcccaatggtgccatcttcgaaccttcactatcagttggaacagaggctgacaacttcacagttctcaatctggctgtggcagctgcatcccatatctatcaaaatcaatttgttcaaatgatcctcaattcacttattaacaagtcaaaatcttctatgttccaagtcagaactttgagagaactgttatggggctatagggatccatttttgagtttggttccgtaccctgttactaccacagttggtctgttttatccttacaacaatactgcagatggagtttataaagttttcaatggaaaagataacataagtaaagttgccataatcgacacatataaaggtaaaaggaatctgtcctattgggaaagtcactgcgacatgattaatggtacagatgcagcctcatttccaccttttgttgagaaaagccaggtattgcagttcttttcttctgatatttgcaggtcaatctatgctgtatttgaatccgacgttaatctgaaaggaatccctgtgtatagatttgttcttccatccaaggcctttgcctctccagttgaaaacccagacaactattgtttctgcacagaaaaaattatctcaaaaaattgtacatcatatggtgtgctagacatcagcaaatgcaaagaagggagacctgtgtacatttcacttcctcattttctgtatgcaagtcctgatgtttcagaacctattgatggattaaacccaaatgaagaagaacataggacatacttggatattgaacctataactggattcactttacaatttgcaaaacggctgcaggtcaacctattggtcaagccatcagaaaaaattcaagtattaaagaatctgaagaggaactatattgtgcctattctttggcttaatgagactgggaccattggtgatgagaaggcaaacatgttcagaagtcaagtaactggaaaaataaacctccttggcctgatagaaatgatcttactcagtgttggtgtggtgatgtttgttgcttttatgatttcatattgtgcatgcagatcgaaaacaataaaataagtaagtatgtaccaaaaaatattgcttcaataatattagcttatatattacttgttttcactttatcaaagagaagttacatattaggccatatatatttctagacatgtctagccactgatcatttttaaatataggtaaataaacctataaatattatcacgcagatcactaaagtatatctttaattctgggagaaatgagataaaagatgtacttgtgaccattgtaacaatagcacaaataaagcacttgtgccaaagttgtccaaaaaa

SEQ ID NO: 30 - DNA, 3427 bp, Homo sapiens
gtaggaatcgcagcgccagcggttgcaaggcccaagaagcccatcctgggaaggaaaatgcattggggaaccctgtgcggattcttgtggctttggccctatcttttctatgtccaagctgtgcccatccaaaaagtccaagatgacaccaaaaccctcatcaagacaattgtcaccaggatcaatgacatttcacacacgcagtcagtctcctccaaacagaaagtcaccggtttggacttcattcctgggctccaccccatcctgaccttatccaagatggaccagacactggcagtctaccaacagatcctcaccagtatgccttccagaaacgtgatccaaatatccaacgacctggagaacctccgggatcttcttcacgtgctggccttctctaagagctgccacttgccctgggccagtggcctggagaccttggacagcctggggggtgtcctggaagcttcaggctactccacagaggtggtggccctgagcaggctgcaggggtctctgcaggacatgctgtggcagctggacctcagccctgggtgctgaggccttgaaggtcactcttcctgcaaggactacgttaagggaaggaactctggcttccaggtatctccaggattgaagagcattgcatggacaccccttatccaggactctgtcaatttccctgactcctctaagccactcttccaaaggcataagaccctaagcctccttttgcttgaaaccaaagatatatacacaggatcctattctcaccaggaagggggtccacccagcaaagagtgggctgcatctgggattcccaccaaggtcttcagccatcaacaagagttgtcttgtcccctcttgacccatctccccctcactgaatgcctcaatgtgaccaggggtgatttcagagagggcagaggggtaggcagagcctttggatgaccagaacaaggttccctctgagaattccaaggagttccatgaagaccacatccacacacgcaggaactcccagcaacacaagctggaagcacatgtttatttattctgcattttattctggatggatttgaagcaaagcaccagcttctccaggctctttggggtcagccagggccaggggtctccctggagtgcagtttccaatcccatagatgggtctggctgagctgaacccattttgagtgactcgagggttgggttcatctgagcaagagctggcaaaggtggctctccagttagttctctcgtaactggtttcatttctactgtgactgatgttacatcacagtgtttgcaatggtgttgccctgagtggatctccaaggaccaggttattttaaaaagatttgttttgtcaagtgtcatatgtaggtgtctgcacccaggggtggggaatgtttgggcagaagggagaaggatctagaatgtgttttctgaataacatttgtgtggtgggttctttggaaggagtgagatcattttcttatcttctgcaattgcttaggatgtttttcatgaaaatagctctttcaggggggttgtgaggcctggccaggcaccccctggagagaagtttctggccctggctgaccccaaagagcctggagaagctgatgctttgcttcaaatccatccagaataaaacgcaaagggctgaaagccatttgttggggcagtggtaagctctggctttctccgactgctagggagtggtctttcctatcatggagtgacggtcccacactggtgactgcgatcttcagagcaggggtccttggtgtgaccctctgaatggtccagggttgatcacactctgggtttattacatggcagtgttcctatttggggcttgcatgccaaattgtagttcttgtctgattggctcacccaagcaaggccaaaattaccaaaaatcttggggggtttttactccagtggtgaagaaaactcctttagcaggtggtcctgagacctgacaagcactgctaggcgagtgccaggactccccaggccaggccaccaggatggcccttcccactggaggtcacattcaggaagatgaaagaggaggtttggggtctgccaccatcctgctgctgtgtttttgctatcacacagtgggtggtggatctgtccaaggaaacttgaatcaaagcagttaactttaagactgagcacctgcttcatgctcagccctgactggtgctataggctggagaagctcacccaataaacattaagattgaggcctgccctcagggatcttgcattcccagtggtcaaaccgcactcacccatgtgccaaggtggggtatttaccacagcagctgaacagccaaatgcatggtgcagttgacagcaggtgggaaatggtatgagctgaggggggccgtgcccaggggcccacagggaaccctgcttgcactttgtaacatgtttacttttcagggcatcttagcttctattatagccacatccctttgaaacaagataactgagaatttaaaaataagaaaatacataagaccataacagccaacaggtggcaggaccaggactatagcccaggtcctctgatacccagagcattacgtgagccaggtaatgagggactggaaccagggagaccgagcgctttctggaaaagaggagtttcgaggtagagtttgaaggaggtgagggatgtgaattgcctgcagagagaagcctgttttgttggaaggtttggtgtgtggagatgcagaggtaaaagtgtgagcagtgagttacagcgagaggcagagaaagaagagacaggagggcaagggccatgctgaagggaccttgaagggtaaagaagtttgatattaaaggagttaagagtagcaagttctagagaagaggctggtgctgtggccagggtgagagctgctctggaaaatgtgacccagatcctcacaaccacctaatcaggctgaggtgtcttaagccttttgctcacaaaacctggcacaatggctaattcccagagtgtgaaacttcctaagtataaatggttgtctgtttttgtaacttaaaaaaaaaaaaaaaagtttggccgggtgcggtggctcacgcctgtaatcccagcactttgggaggccaaggtggggggatcacaaggtcactagatggcgagcatcctggccaacatggtgaaaccccgtctctactaaaaacacaaaagttagctgagcgtggtggcgggcgcctgtagtcccagccactcgggaggctgagacaggagaatcgcttaaacctgggaggcggagagtacagtgagccaagatcgcgccactgcactccggcctgatgacagagcgagattccgtcttaaaaaaaaaaaaaaaaaagtttgtttttaaaaaaatctaaataaaataactttgccccctgc

SEQ ID NO: 31 - DNA, 10107 bp, Homo sapiens
aaatcctaaccctctctcccagaacgtgtctctgctgcaaggcaccgggccctttcgctctgcagaactgcacttgcaagaccattatcaactcctaatcccagctcagaaagggagcctctgcgactcattcatcgccctccaggactgactgcattgcacagatgatggatatttacgtatgtttgaaacgaccatcctggatggtggacaataaaagaatgaggactgcttcaaatttccagtggctgttatcaacatttattcttctatatctaatgaatcaagtaaatagccagaaaaagggggctcctcatgatttgaagtgtgtaactaacaatttgcaagtgtggaactgttcttggaaagcaccctctggaacaggccgtggtactgattatgaagtttgcattgaaaacaggtcccgttcttgttatcagttggagaaaaccagtattaaaattccagctctttcacatggtgattatgaaataacaataaattctctacatgattttggaagttctacaagtaaattcacactaaatgaacaaaacgtttccttaattccagatactccagagatcttgaatttgtctgctgatttctcaacctctacattatacctaaagtggaacgacaggggttcagtttttccacaccgctcaaatgttatctgggaaattaaagttctacgtaaagagagtatggagctcgtaaaattagtgacccacaacacaactctgaatggcaaagatacacttcatcactggagttgggcctcagatatgcccttggaatgtgccattcattttgtggaaattagatgctacattgacaatcttcatttttctggtctcgaagagtggagtgactggagccctgtgaagaacatttcttggatacctgattctcagactaaggtttttcctcaagataaagtgatacttgtaggctcagacataacattttgttgtgtgagtcaagaaaaagtgttatcagcactgattggccatacaaactgccccttgatccatcttgatggggaaaatgttgcaatcaagattcgtaatatttctgtttctgcaagtagtggaacaaatgtagtttttacaaccgaagataacatatttggaaccgttatttttgctggatatccaccagatactcctcaacaactgaattgtgagacacatgatttaaaagaaattatatgtagttggaatccaggaagggtgacagcgttggtgggcccacgtgctacaagctacactttagttgaaagtttttcaggaaaatatgttagacttaaaagagctgaagcacctacaaacgaaagctatcaattattatttcaaatgcttccaaatcaagaaatatataattttactttgaatgctcacaatccgctgggtcgatcacaatcaacaattttagttaatataactgaaaaagtttatccccatactcctacttcattcaaagtgaaggatattaattcaacagctgttaaactttcttggcatttaccaggcaactttgcaaagattaattttttatgtgaaattgaaattaagaaatctaattcagtacaagagcagcggaatgtcacaatcaaaggagtagaaaattcaagttatcttgttgctctggacaagttaaatccatacactctatatacttttcggattcgttgttctactgaaactttctggaaatggagcaaatggagcaataaaaaacaacatttaacaacagaagccagtccttcaaaggggcctgatacttggagagagtggagttctgatggaaaaaatttaataatctattggaagcctttacccattaatgaagctaatggaaaaatactttcctacaatgtatcgtgttcatcagatgaggaaacacagtccctttctgaaatccctgatcctcagcacaaagcagagatacgacttgataagaatgactacatcatcagcgtagtggctaaaaattctgtgggctcatcaccaccttccaaaatagcgagtatggaaattccaaatgatgatctcaaaatagaacaagttgttgggatgggaaaggggattctcctcacctggcattacgaccccaacatgacttgcgactacgtcattaagtggtgtaactcgtctcggtcggaaccatgccttatggactggagaaaagttccctcaaacagcactgaaactgtaatagaatctgatgagtttcgaccaggtataagatataattttttcctgtatggatgcagaaatcaaggatatcaattattacgctccatgattggatatatagaagaattggctcccattgttgcaccaaattttactgttgaggatacttctgcagattcgatattagtaaaatgggaagacattcctgtggaagaacttagaggctttttaagaggatatttgttttactttggaaaaggagaaagagacacatctaagatgagggttttagaatcaggtcgttctgacataaaagttaagaatattactgacatatcccagaagacactgagaattgctgatcttcaaggtaaaacaagttaccacctggtcttgcgagcctatacagatggtggagtgggcccggagaagagtatgtatgtggtgacaaaggaaaattctgtgggattaattattgccattctcatcccagtggcagtggctgtcattgttggagtggtgacaagtatcctttgctatcggaaacgagaatggattaaagaaaccttctaccctgatattccaaatccagaaaactgtaaagcattacagtttcaaaagagtgtctgtgagggaagcagtgctcttaaaacattggaaatgaatccttgtaccccaaataatgttgaggttctggaaactcgatcagcatttcctaaaatagaagatacagaaataatttccccagtagctgagcgtcctgaagatcgctctgatgcagagcctgaaaaccatgtggttgtgtcctattgtccacccatcattgaggaagaaataccaaacccagccgcagatgaagctggagggactgcacaggttatttacattgatgttcagtcgatgtatcagcctcaagcaaaaccagaagaagaacaagaaaatgaccctgtaggaggggcaggctataagccacagatgcacctccccattaattctactgtggaagatatagctgcagaagaggacttagataaaactgcgggttacagacctcaggccaatgtaaatacatggaatttagtgtctccagactctcctagatccatagacagcaacagtgagattgtctcatttggaagtccatgctccattaattcccgacaatttttgattcctcctaaagatgaagactctcctaaatctaatggaggagggtggtcctttacaaacttttttcagaacaaaccaaacgattaacagtgtcaccgtgtcacttcagtcagccatctcaataagctcttactgctagtgttgctacatcagcactgggcattcttggagggatcctgtgaagtattgttaggaggtgaacttcactacatgttaagttacactgaaagtgttcatgtgcttttaatgtagtctaaaagccaaagtatagtgactcagaatcctcaatccacaaaactcaagattgggagctctttgtgatcaagccaaagaattctcatgtactctaccttcaagaagcatttcaaggctaatacctacttgtacgtacatgtaaaacaaatcccgccgcaactgttttctgttctgttgtttgtggttttctcatgtgtatacttggtggaattgtaagtggatttgcaggccagggagaaaatgtccaagtaacaggtgaagtttatttgcctgacgtttactcctttctagatgaaaaccaagcacagattttaaaacttctaagattattctcctctatccacagcattcacaaaaattaatataatttttaatgtagtgacagcgatttagtgttttgtttgataaagtatgcttatttctgtgcctactgtataatggttatcaaacagttgtctcaggggtacaaactttgaaaacaagtgtgacactgaccagcccaaatcataatcatgttttcttgctgtgataggttttgcaagccttttcattattttttagcttttatgcttgcttccattatttcagttggttgccctaatatttaaaatttacacttctaagactagagacccacattttttaaaaatcattttattttgtgatacagtgacagctttatatgagcaaattcaatattattcataagcatgtaattccagtgacttactatgtgagatgactactaagcaatatctagcagcgttagctgtccatatagttctgattggatttcgttcctcctgaggagaccatgccgttgagcttggctacccaggcagtggtgatctttgacaccttctggtggatgttcctcccactcatgagtcttttcatcatgccacattatctgatccagtcctcacatttttaaatataaaactaaagagagaatgcttcttacaggaacagttacccaagggctgtttcttagtaactgtcataaactgatctgaatccatgggcatacctgtgttgcaggtgcagcaattgcttggtgagctgtgcagaattgattgccttcagcacagcatcctctgcccacccttgtttctcataagcgatgtctggagtgattgtggttcttggaaaagcagaaggaaaaactaaaaagtgtatcttgtattttccctgccctcaggttgcctatgtattttaccttttcatatttaaggcaaaagtacttgaaaattttaagtgtccgaataagatatgtcttttttgtttgttttttttggttgtttgtttgttttttatcatctgagattctgtaatgtatttgcaaataatggatcaattaattttttttgaagctcatattgtatctttttaaaaaccatgttgtggaaaaaagccagagtgacaagtgacaaaatctatttaggttctctgtgtatgaatcctgattttaactgctaggattcagctaaatttctgagctttatgatctgtggaaatttggaatgaaatgcaattcattttgtacatacatagtatattaaaactatataatagttcatagaaatgttcagtaatgaaaaatatatccaatcagagccatccctaaagagtgttctcttgtcttcctttgtatcctctttggctccttcccttagcttccaccccagacatcagacctggggctgccttctctccctgccaaagcttgctgttagcattgtctgcttgccctcaactcctgccttgttccctgttgaaatgtatcaatcccgtactttatctctccaggacaaggataagtgtggctacagtaaaagtttattgctctaaacggcgctaacctgagataatgagaaaaggccagaagagattgtttgatctctgtctgtcaatatatatgcatttcaactgtgaccatctggatccagggccctttctaacctatataacgactcatttgtttggttaatgatgaatatcactggggctcttaagtcctttcgttctatccaagacttcattgtttttttctgtatgaaaaaagtgcagaatatcactcacctttcccctacttttggatcccctacacgaggatcactagcttaatgagaagcagagtaacgctattaagtctgggcaagctccttataagttgctgtgtgcttaaaagaatgtgatttatgtctggggccaaagcagttttccttcttttccctcattgaattcaagacagctagacccttgtgtagatcccaggatattacctctactccccccaacctgtgtgtgtagggagagtaacaacacgggaagaggggagggaagttggaaggagattggtcacatgttcagttgtctgagatactggtaaatgtgcgctgtttgtcaatgaaggttgcatgcctgcatttacaaggtggtctcatactgattgtgctctgtccagttagattcgtggcttctcccttggaagctacaattaaggactagttagaagcagaggctagatgtgttctctccagcccttactaactgggaaaataattgagaaatccctcttttcctcagtgaaagcccagtcattggttagaaaaatctaattgtcaaactagcattatgttccatcatatctgtgggatagtaattcatgtaagacacatttttacctctcttacaagtcaattcacttacaagccagtttcaaatcaagcttcccttgcgaggaatggagatcattatggggcttattatgactacatttcttttatgagtgaccattttaaataattaatattttatttaatattaaattattaaagacttagctagacttttaacattagatgaaccttgtgaatcatatattgcatagattagcacatgtatgcaatctaggtcatcaatttgttgaatttatacagccctagatttgagattgtggccctgagtatctggatagttgagttgtgtgtttatgtgcttatatgatagaggtgctttgttcctgcagcttagaaacagaagcagccattcactgagaagcttaagagaggaagtatcaacctcattttccaaaccagcattactttcaccgctcgtggatctgaaagattacatttagaacatttagtactattacactctcagaaactgtggtaaaaagtcacattttcaaaacttcatgcatattgtattcttgttggaaataagtcctatagtttcttaattgtcttcatgccgtccatatttaacaaacattgcaagtcctttttatatttgggtaattatttgtaatttagtgaaggagactaggggatgttttcttccaaagggaatttaaaatcaattttatggtattttgaaagtaaaatactccttaacgtgtcaatatttttaaaatgttatctcgaagttttctattgctcaggtatataatctaataaaattttttgtttgctctaaggttatttttgctattctctattttgaattatgttaaaatttgtgtgcattttatgaaatgccttttttcttattttgaaagtgtaaaattgggcatctcagagtaaaatgtgggattattagctacaaagactaggcacatcgtgaaagctcagtaactaattttcttgactgagtcctatcccagagtgtcacagattcaacagaattttcctgaagggtgatacacaccaaaatctagcttgtgtggatctgagactattgactcaaagattcaaatctacttcggaagtgactccacggtttgagtgaaaactgaggaaggactcatgcctgtatatcactagatatcttatttctccataattttaagtgttcataatttcttcttctttgatgggtgtgcaactggggcatgtttgtaccagccagcatgtgttctgcccaacagtgtgtccgtgtgtgaggttaactgattcagaactcattctcttgataaactatttcttgaaagcatttattttaagtctttatttcctgctgaaatgaagtttcatgctgtcatgcccatcttatttattctagaagaaaattttcatagaagaaaatgatttatggccaaagttacagaacattcatcttttagacttagccttagaatatcattggaaattacttggcttgaatttggttcgtttttatctttatggattatgtaccagggctattaataatacttaaaccccttattttgctatggtggttagatttttttattccttttcaattagtgctattaattattacatggtcgtattcatgcttattacagatgaactatttttagtgccagtgtaaaggattaagaataacattcaattagttggctatttcaggctttattgtacatggtaatgtttcagggagtgtgatttggtctagaatatatccagatccttgtaattatgatattgggttatgacaggattctattatttttagctatgaatggtgcttatttttccctatattaggaatgttaatatttggattatcagagtccatgttataaacagaatttacctatgcaagacaaattctaactgtgcaacattttcatgagaattaaaagttgtgtgttaaggggaaaaccctctgaatgtttttatgtgtaagtgcctaaagaaccgtagaaacagtacatcaaaagctcttataaaagaaaaactgattgaacattagccagaaacaaaatatgatttacatttttttttttggttgctgggactgaataccctaaaaactaagagatgtgagtggggaaaatgtctaattgataagaaagttgatttatattatatttacatgcatcttctaagattgcctttacagtagccaatcagaactttaaaaaaaaaaaagctaacaacatagatcctatgtgttgcccttaagactaaaatactttgcacacgtgattgaatggctcacttaagttgttgaatttccttatacatttaaagtgtacttccgttaagaattattccattttaaatgggtaactttcagcttccgaactattttcctaaacattccagttgtgtattataaaagatcaaaatatctctaggtggtagtacaattttcatttataacgtggaaaagttaactgttaggtttaacattagtattagtgtttttgcaattgctcatagaaaagaacactgaataatggttttcatacaatttttgtaaaacattcttctcccagtttgattccaaatgcttttccccaaattgtctaatatatcataagctagtgtttccttgtatttaatttttccttccaacacaatatttaggaaaaatatgaataacattgtgagtagcgggagacaacacgaaaaagaaacctttcattgttgtggaggggtaggtgttatgtgattgatgcccttcctggcgtttgttttatcctgttattttctcaaaaaagagcacggctttttcttaaatacatttaaattcagaattgcttgcaaaagattggcctggatagatagacatcctagatttaagatagtaccatcttaaaagtatgttgaaaggtaaaataaatcatttcaaaatacttaactttcctaataaggatgttaggttttcttctctttcattagctggccataagtcaaggtccttataacactaggaaattacctttttttactttcaaaattgcattatagtgaattactgtttacaaaatacacatactgtgaacagatataagtttctgtcttttataaggtttgtagaatgaatgtttttttaaagtgagtattatatgttaaatattttaagttttttataaatactagtaactgtttactaatttttgtttggtcaaatgcttgtaaatgtagctgaaagaagatagggagaaactgcggatcccaaactgttccctttttcatttcttgaaatgttaccactacagacatttttttaaggtgaataaacagttgtgatgtgctgtacctaaaatcatgtttaatcgtataaggaaacatttcaatacacttatacaggaagaaaactatagatgaagtacatgtgtgtgattcagtctgattcacagaattctgagagtaatatggaataaaacaactccacttagatgataactgaagcatttcctgccttgtgaaaatttggattttaaattgctgttagaatgggaaatttggacactttatatcattgtataatttcagaatttagtttctgtatcttttggaaaacatgattatagcaaaaacatagaaaataatctattactaaaacaccataaatgtaaaactagtatgcttggctgttaactctaaagatgttacttatgtctgtttttaaaacatgcatgtatttaacaattttatcatagtattgtcatggaaaaaataaatatattttcttacatcttaaaaaaaaaaaaaaaaaa

SEQ ID NO: 32 - DNA, 2916 bp, Homo sapiens
actctgcagcctgggctctgtgagactgaggtggcggtcagccggagtgagtgttggggtcctggggcacctgccttacatggcttgtttatgaacattaaagggaagaagttgaagcttgaggagcgaggatggcagtcaacaaaggcctcaccttgctggatggagacctccctgagcaggagaatgtgctgcagcgggtcctgcagctgccggtggtgagtggcacctgcgaatgcttccagaagacctacaccagcactaaggaagcccaccccctggtggcctctgtgtgcaatgcctatgagaagggcgtgcagagcgccagtagcttggctgcctggagcatggagccggtggtccgcaggctgtccacccagttcacagctgccaatgagctggcctgccgaggcttggaccacctggaggaaaagatccccgccctccagtacccccctgaaaagattgcttctgagctgaaggacaccatctccacccgcctccgcagtgccagaaacagcatcagcgttcccatcgcgagcacttcagacaaggtcctgggggccgctttggccgggtgcgagcttgcctggggggtggccagagacactgcggaatttgctgccaacactcgagctggccgactggcttctggaggggccgacttggccttgggcagcattgagaaggtggtggagtacctcctccctccagacaaggaagagtcagcccctgctcctggacaccagcaagcccagaagtctcccaaggccaagccaagcctcttgagcagggttggggctctgaccaacaccctctctcgatacaccgtgcagaccatggcccgggccctggagcagggccacaccgtggccatgtggatcccaggcgtggtgcccctgagcagcctggcccagtggggtgcctcagtggccatgcaggcggtgtcccggcggaggagcgaagtgcgggtaccctggctgcacagcctcgcagccgcccaggaggaggatcatgaggaccagacagacacggagggagaggacacggaggaggaggaagaattggagactgaggagaacaagttcagtgaggtagcagccctgccaggccctcgaggcctcctgggtggtgtggcacataccctgcagaagaccctccagaccaccatctcggctgtgacatgggcacctgcagctgtgctgggcatggcagggagggtgctgcacctcacaccagcccctgctgtctcctcaaccaaggggagggccatgtccctatcagatgccctgaagggcgttactgacaacgtggtggacacagtggtgcattacgtgccgctccccaggctgtcgctgatggagcccgagagcgaattccgggacatcgacaacccaccagccgaggtcgagcgccgggaggcggagcgcagagcgtctggggcgccgtccgccggcccggagcccgccccgcgtctcgcacagccccgccgcagcctgcgcagcgcgcagagccccggcgcgccccccggcccgggcctggaggacgaagtcgccacgcccgcagcgccgcgcccgggcttcccggccgtgccccgcgagaagccaaagcgcagggtcagcgacagcttcttccggcccagcgtcatggagcccatcctgggccgcacgcattacagccagctgcgcaagaagagctgagtcgccgcaccagccgccgcgccccgggccggcgggtttctctaacaaataaacagaacccgcactgcccaggcgagcgttgccactttcaaagtggtcccctggggagctcagcctcatcctgatgatgctgccaaggcgcactttttatttttattttatttttattttttttttagcatccttttggggcttcactctcagagccagtttttaagggacaccagagccgcagcctgctctgattctatggcttggttgttactataagagtaattgcctaacttgatttttcatctctttaaccaaacttgtggccaaaagatatttgaccgtttccaaaattcagattctgcctctgcggataaatatttgccacgaatgagtaactcctgtcaccactctgaaggtccagacagaaggttttgacacattcttagcactgaactcctctgtgatctaggatgatctgttccccctctgatgaacatcctctgatgatctaggctcccagcaggctactttgaagggaacaatcagatgcaaaagctcttgggtgtttatttaaaatactagtgtcactttctgagtacccgccgcttcacaggctgagtccaggcctgtgtgctttgtagagccagctgcttgctcacagccacatttccatttgcatcattactgccttcacctgcatagtcactcttttgatgctggggaaccaaaatggtgatgatatatagactttatgtatagccacagttcatccccaaccctagtcttcgaaatgttaatatttgataaatctagaaaatgcattcatacaattacagaattcaaatattgcaaaaggatgtgtgtctttctccccgagctcccctgttccccttcattgaaaaccaccacggtgccatctcttgtgtatgcagggctatgcacctgcaggcacgtgtgtatgcactccccgcttgtgtttacacaagctgtggggtgttacgcatgcctgcttttttcacttaataatacagcttggagagatttttgtatcacattataaatcccactcgctctttttgatggccacataataactactgcataatatggatacgccttatttgatttaactagttccctaatgatggacttttaagttgtttcctttttttttcttttttgctactgcaaacgatgctataataaatgtccttatcaaaaa

SEQ ID NO: 33 - DNA, 6339 bp, Homo sapiens
aatcgagggtttcggggacgccgagcggcactttcctcttcccagcgagtgaaggagggcagtcggcggctctcgcgccccggccactttccctgcgcgattcccggagctccctgcaggaggtgagagtccccagcgggtccggatggcgtagttttgccgcggcgcagcagctgccggagctcgccgccgccgagcgctgggcggggaaacttgccgccgctttcctccaacttgctgcgggtggatctccgctggacacaccgcctccgaggcagtttgaaaattgcaaggagggactttaagactacttctgatttgcaaagattgtctgtgctctgagcaggctgaagtgactggacgagacgcactgttggagaaataaaaatgacttcccattatgtgattgccatctttgccctgatgagctcctgtttagccactgcaggtccagagcctggtgcactgtgtgaactgtcacctgtcagtgcctcccatcctgtccaggccttgatggagagcttcactgttttgtcaggctgtgccagcagaggcacaactgggctgccacaggaggtgcatgtcctgaatctccgcactgcaggccaggggcctggccagctacagagagaggtcacacttcacctgaatcccatctcctcagtccacatccaccacaagtctgttgtgttcctgctcaactccccacaccccctggtgtggcatctgaagacagagagacttgccactggggtctccagactgtttttggtgtctgagggttctgtggtccagttttcatcagcaaacttctccttgacagcagaaacagaagaaaggaacttcccccatggaaatgaacatctgttaaattgggcccgaaaagagtatggagcagttacttcattcaccgaactcaagatagcaagaaacatttatattaaagtgggggaagatcaagtgttccctccaaagtgcaacatagggaagaattttctctcactcaattaccttgctgagtaccttcaacccaaagcagcagaagggtgtgtgatgtccagccagccccagaatgaggaagtacacatcatcgagctaatcacccccaactctaacccctacagtgctttccaggtggatataacaattgatataagaccttctcaagaggatcttgaagtggtcaaaaatctcatcctgatcttgaagtgcaaaaagtctgtcaactgggtgatcaaatcttttgatgttaagggaagcctgaaaattattgctcctaacagtattggctttggaaaagagagtgaaagatctatgacaatgaccaaatcaataagagatgacattccttcaacccaagggaatctggtgaagtgggctttggacaatggctatagtccaataacttcatacacaatggctcctgtggctaatagatttcatcttcggcttgaaaataatgcagaggagatgggagatgaggaagtccacactattcctcctgagctacggatcctgctggaccctggtgccctgcctgccctgcagaacccgcccatccggggaggggaaggccaaaatggaggccttccgtttcctttcccagatatttccaggagagtctggaatgaagagggagaagatgggctccctcggccaaaggaccctgtcattcccagcatacaactgtttcctggtctcagagagccagaagaggtgcaagggagcgtggatattgccctgtctgtcaaatgtgacaatgagaagatgatcgtggctgtagaaaaagattcttttcaggccagtggctactcggggatggacgtcaccctgttggatcctacctgcaaggccaagatgaatggcacacactttgttttggagtctcctctgaatggctgcggtactcggccccggtggtcagcccttgatggtgtggtctactataactccattgtgatacaggttccagcccttggggacagtagtggttggccagatggttatgaagatctggagtcaggtgataatggatttccgggagatatggatgaaggagatgcttccctgttcacccgacctgaaatcgtggtgtttaattgcagccttcagcaggtgaggaaccccagcagcttccaggaacagccccacggaaacatcaccttcaacatggagctatacaacactgacctctttttggtgccctcccagggcgtcttctctgtgccagagaatggacacgtttatgttgaggtatctgttactaaggctgaacaagaactgggatttgccatccaaacgtgctttatctctccatattcgaaccctgataggatgtctcattacaccattattgagaatatttgtcctaaagatgaatctgtgaaattctacagtcccaagagagtgcactttcctatcccgcaagctgacatggataagaagcgattcagctttgtcttcaagcctgtcttcaacacctcactgctctttctacagtgtgagctgacgctgtgtacgaagatggagaagcacccccagaagttgcctaagtgtgtgcctcctgacgaagcctgcacctcgctggacgcctcgataatctgggccatgatgcagaataagaagacgttcactaagccccttgctgtgatccaccatgaagcagaatctaaagaaaaaggtccaagcatgaaggaaccaaatccaatttctccaccaattttccatggtctggacaccctaaccgtgatgggcattgcgtttgcagcctttgtgatcggagcactcctgacgggggccttgtggtacatctattctcacacaggggagacagcaggaaggcagcaagtccccacctccccgccagcctcggaaaacagcagtgctgcccacagcatcggcagcacgcagagcacgccttgctccagcagcagcacggcctagcccaacccagcccaacccggcccaacccagcccagcccagctcagctcagctactgccaagggcaggaccaatggctgagcctcgtgtccagactcagagggctggattttggttcccttgtaaagacagagtgaatttcagtataaagatcacccgttgtattcaccccacacccagggctagtataaacatgaccctgggcttctgtaccacactagaattcatgtgagaaagctaaaatggtggtcttctccaccagcccctcacaggcttgggggttttcaatgtgaaacacatgccagtttttaaaatgctgctttgtccaggtgagaacatccataatttggggccctgagttttacccagactcaaggagttggtaaagggttaatagccagatagtagaaccagtgaggagatgcggccaaagattctttatatctgaaccaagatgtaaaacaagaaatgctttgaggctttctaagcgatcctcctgtctaatttgcacctttgtctggatgcacacttctgaccttgctgccacaacctgtggggtctgatgtgtcccttgatgggtgctgccctcagggactgcaccctgacaagtgttaaggcaacattcctttcttgtgccctgggccaaaaccaatgctgatgaccttatcagcttcctgtttcttcccatacttgcatacaccactgcaaaatgtcttaatgcaaattttgtatttcttacaggcctacagaaattgaaaatgaccaaaatcaggaaccacagatttgtgcccattcctaatattttgttctgcaaattaatgtataatttgaggtgaaattcagttataaagtcaaggacgaatttgcacagtgatatatttctatgtgtatgcaagtacaagtatataatatgtcacctggcacattcattttctcagttgaagaagagaaaatttgaaaatgtccttatgcttttagagttgcaacttaagtatatttggtagggtgagtgtttccactcaaaatatgtcaacttaaaaaaaaataggccctttcataaaaaccaaactgtagcaagatgcaaatgcatggcaaatcctgtcggtctccagttggttatctgaatagtgtcaccaattccaccaagacagtgctgagattggaaaagggcactcatttggattgccttacttctcttgccttaaatatatcccatatatttaatatgtcaaaaagggcttgaggtgaatttcattaaatggaataatatgatgccactttgcagctaaaataagctcagtgatacctccttgttaaaaaaaaaaaaaaaaaaaaagaatgccaggggggaattatcatgctaaattattttactgctgaagatagcttcattgcaaattattctttttccagaatttcccccaaacaacttagaattccataagtagaacaagatagattctacccccaaaatattcataagcaaatcccactgcccttaaaataaggaagttatgcctggttgtctgtgaatggaacctcagtaggtaatcctgatgaagcttaaaaccttagggcagtgtctacatgggaaacaagtatgtggaaattgacaatcatttttaccaaatcgttgagtaataatatgacttacctgatagatatacacattcaataaggaacatttttttttttcaataaggaacattttaactaaaacattactttagggctgagatttccaggctatctacattgatctactgaaaaatttctagatttccatatacaaacgaagaagacatgagtttagagaatttttttcctttaatttttttttaacagaagggtatcagagtggaggacctagattacgctacctgtgtttgaaaatattgcgctttgcctaaccttcggtggaatgtattgtttcagcatattctatgtataaaaaagtttaaagatgtcttcaaagaagactagagtctttaagtcacttatagctatattttactacaaaatttgtgtataaagatatatttaagtgttttagataaatttaagttactccatatgaaatgtttaatttcagctactgtgaattctttcgatcagtcctttgcttttttaaaaaatcttttccatcgtgttaaaaagaaaattagctattaggagatattaaaagattgatgtcttagaaggacagggttaaaaccttctgtaatatatttaaatatatatttttaagagagatgctacattgccaatgattttataaataatttaaaattaatttacaaatttatagatgcaaaccaaaagatctttttaaaagagagagagaggaaaaaaatcaccttttatttgtttgggtctcattgtcagaattattattcagatcaagaaatctgtgtcgataaaacctaatctcatattggagagtgaatgtcgttaagtatttctgaaatgtttctaaaaaatgaacatgaaaaaaataaggtattttctccctagcttctcattacagtatttctaattgcttcacactttacagttttaatacaaagtacaagctctacttttataacgtgtactacaagtttctttaaaagtattgttgtatttcagctgaactcttgtatctgcagtcttttgttatttctgcaggctacacccttaatttgcagaggccattttgttgtttgtttgatgctgaagctgttgttaaaatgccccaaactccaaggcagattgtctgtataatacgctatagcttttcaccatgtggtgtttaccagctgttactctgtattttaaaaagccagagatttcttctgtctaaactgtttctatagcattttctaaacaaaaaaaatggtttttttctttgccttgtaataagattgtaaatccatttcctgcttgtgttcttagtgggcatgattgtgagtgtgtgtggggtgctcacacgcgtgccagtctttttgtactgtaactacctcatggtttgaatgatgattgtactgctggttgtgttaacagagcacattttgttgggtgagtcctatgtgatttttttcatgtttgttttatctgggggttgttcatgaaactgacagatgtttttctaaaaaggactattatcagtttccaaatacaatacttctctcttctggtttttcctgaatgagcctgattttgttgctggttttcatcatctatgagggtaaaacgagtacccttaaaatccctgtggccagtttgaacacccctgttgtattcttttctctgttcagtgtgtcagctattttgtgaagatgcttagatgtatagttttgataaccacagttttaaatcttttatctgtgcataataaaaagatatatatcagttattaa

SEQ ID NO: 34 - DNA, 3054 bp, Homo sapiens
gatcagcgtagccagttgttgcctgtctgaacctctgccagtcctggagactggtgccctgagctccaaccagcgggcctcatcctacaccctcaccaccgcaacttctcacccgagcaagaagcagctcccagagagaaagaacgttcccacctgcctagccatgggagaggacgctgcacaggccgaaaagttccagcaccctgggtctgacatgcggcaggaaaagccctcgagccccagcccgatgccttcctccacaccaagccccagcctgaacctagggaacacagaggaggccatccgggacaactcacaggtgaacgcagtcacggtgctcacgctcctggacaagctggtgaacatgctagacgctgtgcaggagaaccagcacaagatggagcagcgacagatcagtttggagggctccgtgaagggcatccagaatgacctcaccaagctctccaagtaccaggcctccaccagcaacacggtgagcaagctgctggagaagtcccgcaaggtcagcgcccacacgcgcgcggtcaaagagcgcatggataggcagtgcgcacaggtgaagcggctggagaacaaccacgcccagctcctccgacgcaaccatttcaaagtgctcatcttccaggaggaaaatgagatccctgccagcgtgtttgtgaaacagcccgtttccggtgccgtggaagggaaggaggagcttccggatgaaaacaaatccctggaggaaaccctgcacaccgtggacctctcctcagatgatgatttgccccacgatgaggaggccctggaagacagtgccgaggaaaaggtggaagaaagtagggcagagaaaataaaaagatccagcctgaagaaagtggatagcctcaagaaagcattttctcgccagaacatcgagaaaaagatgaacaagctggggacaaagatcgtatctgtagagaggagagagaagattaagaaatctctcacgtcaaatcaccagaaaatatcctcaggaaaaagctcccccttcaaggtttctcccctcactttcgggcggaagaaagtccgagagggagaaagccatgcagaaaatgagaccaagtcagaagacctgcctagcagtgagcagatgccaaatgaccaggaagaggagtcctttgcagagggtcattccgaagcgtccctcgccagcgctctggtggaaggggaaattgcagaggaggctgctgagaaggcgacctccagggggagtaactcggggatggacagcaacatcgacttgactattgtggaagatgaagaggaggagtcagtggccctggaacaggcacagaaggtacgctatgagggtagctacgcgctaacatccgaggaggcggagcgctccgatggggaccccgtgcagcccgccgtgctccaggtgcaccagacctcctgagcttagagccaccgtgccatcctgtgctgtgctcaagcgggcagccagggctgaagaacaaactcttgcacatctccagcacgactcacccactcctgcgttcctgtccaggcagtaatcattgaccatatagtcatagtaagacacacgagaccaggctttaccatgaaagcgacctgtcacggactccacttttaatttgctcttaggttctatctctgtagaatgtctccaagattgaagaagaaactgagcagttgaaaaatgctaatctctttgacttagtcagaaaaaaacagaggataattaagatactagtcatgaaaagtgattcattcttttttgtcattccataagcttgctgaatagtgtaccggtaatatattgtatttccaccgtactctgtgaatctaattattattctttaagtgttgatatataatatacataaatatgtaagctaaacatataactatatgttttaagaagaaaacatctacgaaaggtaaaaagagatgatcagttggttgtttacttgctagaaaccattgttttattgcaaacgaaggaaaaatgaagagattataaaagtcagctaatgaagtaagatacgtagtaaagtcaggactattcaaaaagtaagaaagaaaatttggaaaatgagagaaacaggaaacaaagaatgccgaaaagaatgaaaacagagaaaaaatgtatgtgcttgaaagtaaaatacttacaatagtagcttaactatttcactctttaaataaaaatactaaagaagttcgtatatcctggaataacatgtcatcttcaaaatatttttattttctaatatttttaataataaacattttatagtgttaaagctgtatttttcttaataaataaaggacattacaaatatttctttaaggaagttcaaaaggatgttgtcttgttaacactggaacgaatataaatcttcaaaatacaattaatatatactgttttgtggaaacttagctcatactattctttaatgctcttcaaatttaaactaacccttacattccatgtgatgtgatgtaggcttataagatgctaaaatctataggttttggaagtgaaagattctattttttctttttttgtacataatgggaatttcattccagattatattttatttacatattaatttcacagaatattaatatttcttaacttcttaaagcatgctagcgttttatgtatatgtacacatatattcagacagggtaattttatctgctgcctaacattgtactaaaatattgctttatctgtttttaattacaaaatgctaatgatttcttaaattatagtttaaagacaattggcccaggaagcaaatcccctgcctttagtatgaaccactataagtaaccttacaaatagagttaatccaagacaatattaacaaactgtgctttgtctttaataaaagggataggattaacaaacatattgatggcataacctattcagctatgtccttatttttgcaataatgtaacctcaaatattggattgttgaaccaacaatggctgtgttaaagaagattaaataaaccgaaaaataaaaagca

SEQ ID NO: 35 - DNA, 4542 bp, Homo sapiens
attctgactgcagtctgtggttctgattccataccagaggggctcaggatgctgttgctgggagctgttctactgctattagctctgcccggtcatgaccaggaaaccacgactcaagggcccggagtcctgcttcccctgcccaagggggcctgcacaggttggatggcgggcatcccagggcatccgggccataatggggccccaggccgtgatggcagagatggcacccctggtgagaagggtgagaaaggagatccaggtcttattggtcctaagggagacatcggtgaaaccggagtacccggggctgaaggtccccgaggctttccgggaatccaaggcaggaaaggagaacctggagaaggtgcctatgtataccgctcagcattcagtgtgggattggagacttacgttactatccccaacatgcccattcgctttaccaagatcttctacaatcagcaaaaccactatgatggctccactggtaaattccactgcaacattcctgggctgtactactttgcctaccacatcacagtctatatgaaggatgtgaaggtcagcctcttcaagaaggacaaggctatgctcttcacctatgatcagtaccaggaaaataatgtggaccaggcctccggctctgtgctcctgcatctggaggtgggcgaccaagtctggctccaggtgtatggggaaggagagcgtaatggactctatgctgataatgacaatgactccaccttcacaggctttcttctctaccatgacaccaactgatcaccactaactcagagcctcctccaggccaaacagccccaaagtcaattaaaggctttcagtacggttaggaagttgattattatttagttggaggcctttagatattattcattcatttactcattcatttattcattcattcatcgagtaactttaaaaaaatcatatgctatgttcccagtcctggggagcttcacaaacatgaccagataactgactagaaagaagtagttgacagtgctattttgtgcccactgtctctcctgatgctcatatcaatcctataaggcacagggaacaagcattctcctgtttttacagattgtatcctgaggctgagagagttaagtgaatgtctaaggtcacacagtattaagtgacagtgctagaaatcaaacccagagctgtggactttgttcactagactgtgcccttttatagaggtacatgttctctttggagtgttggtaggtgtctgtttcccacctcacctgagagccattgaatttgccttcctcatgaattaaaacctcccccaagcagagcttcctcagagaaagtggttctatgatgacgtcctgtcttggaaggactactactcaatggcccctgcactactctacttcctcttacctatgtcccttctcatgcctttccctccaacggggaaagccaactccatctctaagtgccgaactcatccctgttcctcaaggccacctggccaggagcttctctgatgtgatatccactttttttttttttgagatggagtctcactctgtcacccaggctggagtacagtgacacgacctcggctcactgcagcctccttctcctgggtccaagcaattattgtgcctcagcctcccgagtagctgagacttcaggtgcattccaccacacatggctaatttttgtatttttagtagaaatggggtttcgtcatgttggccaggctggtctcgaactcctggcctaggtgatccacccgcctcgacctcccaaagtgctgggattacaggcatgagccaccatgcccagtcgatatctcactttttattttgccatggatgagagtcctgggtgtgaggaacacctcccaccaggctagaggcaactgcccaggaaggactgtgcttccgtcacctctaaatcccttgcagatccttgataaatgcctcatgaagaccaatctcttgaatcccatatctacccagaattaactccattccagtctctgcatgtaatcagttttatccacagaaacattttcattttaggaaatccctggttttaagtatcaatccttgttcagctggacaatatgaatcttttccactgaagttagggatgactgtgattttcagaacacgtccagaatttttcatcaagaaggtagcttgagcctgaaatgcaaaacccatggaggaattctgaagccattgtctccttgagtaccaacagggtcagggaagactgggcctcctgaatttattattgttctttaagaattacaggttgaggtagttgatggtggtaaacattctctcaggagacaataactccagtgatgttcttcaaagattttagcaaaaacagagtaaatagcattctctatcaatatataaatttaaaaaactatctttttgcttacagttttaaattctgaacaattctctcttatatgtgtattgctaatcattaaggtattattttttccacatataaagctttgtctttttgttgttgttgttgtttttaagatggagtttccctctgttgccaggctagagtgcagtggcatgatctcggcttactgcaacctttgcctcccaggttcaagcgattcttctgcctcagcctcccgagtagctgggaccacaggtgcctaccaccatgccaggctaatttttgtatttttagtaaagacagggtttcaccatattggccaggctggtctcgaactcctgaccttgtgatctgcccgcctccatttttgttgttattttttgagaaagatagatatgaggtttagagagggatgaagaggtgagagtaagccttgtgttagtcagaactctgtgttgtgaatgtcattcacaacagaaaacccaaaatattatgcaaactactgtaagcaagaaaaataaaggaaaaatggaaacatttattcctttgcataatagaaattaccagagttgttctgtctttagataaggtttgaaccaaagctcaaaacaatcaagacccttttctgtatgtccttctgttctgccttccgcagtgtaggctttaccctcaggtgctacacagtatagttctagggtttccctcccgatatcaaaaagactgtggcctgcccagctctcgtatccccaagccacaccatctggctaaatggacatcatgttttctggtgatgcccaaagaggagagaggaagctctctttcccagatgccccagcaagtgtaaccttgcatctcattgctctggctgagttgtgtgcctgtttctgaccaatcactgagtcaggaggatgaaatattcatattgacttaattgcagcttaagttaggggtatgtagaggtattttccctaaagcaaaattgggacactgttatcagaaataggagagtggatgatagatgcaaaataatacctgtccacaacaaactcttaatgctgtgtttgagctttcatgagtttcccagagagacatagctggaaaattcctattgattttctctaaaatttcaacaagtagctaaagtctggctatgctcacagtctcacatctggttggggtgggctccttacagaacacgctttcacagttaccctaaactctctggggcagggttattcctttgtggaaccagaggcacagagagagtcaactgaggccaaaagaggcctgagagaaactgaggtcaagatttcaggattaatggtcctgtgatgctttgaagtacaattgtggatttgtccaattctctttagttctgtcagcttttgcttcatatattttagcgctctattattagatatatacatgtttagtattatgtcttattggtgcatttactctcttatcattatgtaatgtccttctttatctgtgataattttctgtgttctgaagtctactttgtctaaaaataacatacgcactcaacttccttttctttcttccttcctttctttcttccttcctttctttctctctctctctctttccttccttccttcctccttttctttctctctctctctctctctctttttttgacagactctcgttctgtggccctggctggagttcagtggtgtgatcttggctcactgctacctctaccatgagcaattctcctgcctcagcctcccaagtagctggaactacaggctcatgccactgcgcccagctaatttttgtatttttcgtagagacggggtttcaccacattcgtcaggttggtttcaaactcctgactttgtgatccacccgcctcggcctcccaaagtgctgggattacaggcatgagccatcacacctggtcaactttcttttgattagtgtttttgtggtatatctttttccatcatgttactttaaatatatctatattattgtatttaaaatgtgtttcttacagactgcatgtagttgggtataatttttatccagtctaaaaatatctgtcttttaattggtgtttagacaatttatatttaataaaattgttgaatttaa

SEQ ID NO: 36 - DNA, 2887 bp, Homo sapiens
agggagtgtggcactgagccggctcaggcagagacgcggcaccatggctagcaagaaagtctgcattgtaggctccgggaactggggctcagccatcgccaagatcgtgggtggcaatgcagcccagctggcacagtttgacccacgggtgaccatgtgggtatttgaggaagacattggaggcaaaaagctgactgagatcatcaacacgcagcatgagaatgtcaaatacctgccagggcacaagttgcccccaaatgtggtggctgtcccagatgtggtccaggctgcagaggatgctgacatcctgatctttgtggtgccccatcagttcatcggcaagatctgtgaccagctcaagggccatctgaaggcaaacgccactggcatatctcttattaagggggtagacgagggccccaatgggctgaagctcatctcggaagtgattggggagcgcctcggcatccccatgagtgtgctgatgggggccaacattgccagcgaggtggctgatgagaagttctgtgagacaaccattggctgcaaggacccggcccagggacaactcctgaaagagctgatgcagacaccaaacttccgtatcacagtggtgcaagaggtggacacagtagagatctgtggagccttaaagaatgtagtggccgtgggggctggcttctgtgatggcctgggctttggcgacaacaccaaggcggcagtgatccggctgggactcatggagatgatagccttcgccaagctcttctgcagtggccctgtgtcctctgccaccttcttggagagctgtggtgttgctgacctgatcactacctgctatggagggcggaaccggaaagtggctgaggcctttgcgcgtacaggaaagtccattgagcagctggagaaagagttgctgaatgggcagaaactgcaggggcccgagacagcccgggagctatacagcatcctccagcacaagggcctggtagacaagtttcccttgttcatggctgtgtacaaggtgtgctacgagggccagccagtgggtgaattcatccactgcctgcagaatcatccagaacatatgtgagtggggccagggcccaggccaggccgcttttttaccccagtggagaccagcagaagcctggggtacctagtcaccaggatctccaggactcccagggagcagagtcttctcatcttttcactggaggacaggaggctatggggcccagctacgcacctggagatcctgaactgtcaagccactggcagcctcatgccaccacatttgccagaaatgcagttgccctgtccctctccagatgtggggctttctccatatcctctgggaggggtggaatcaagccccagtgctgcctgcttggtggcgggggtgatgtatgtggagaagggttgggggagaggccggtagggcaggggctgctagtggctgtctcacatacaccagtaatcctgttaaagggctgaagaagtatcttagccacaggagcgatgaggcaaggattgtcagggaggggtctgggcttctgagctgatgcaggccccaaggacccctttgctgacctctgccaggacccacacagcttcgatggatctcagtgtttgttaacaaaatacaaagatctcaaacaaaccccttttagcttctcctagcaacatctgtgtcctcagaaacctctggttctcccccttccccctcccccaggctgccctggcacccaaattgctgccatgctggcatctgtagctcggtggcttgacattctccccagggacttcccggttcctagttctttgccagctcctccccactctgtgcgacctttccaagccttccctcaccctccccgccagcaccctctttggggagcaggaacttaatctgctgacagagctacacctttcataacaggctcagatcactcagctccctgtgacctttgtattcacccaggcttccttctcagtagctctagctgggggaggtgtcagctgggcccctcctgtgctatctccccagaggacatccctgactccacccctttcttcctcccaaactctgcacctcttcctcagctgctccagaccggccagggtaaccagctaaccatgcctggcatctggaagccagcaggccagagggtggcccaaaggctgatgaacggtagggaagggtgagcagattcctatgttggtgggcaccaatattccaagggcagctctctttgctgaatgagggccttctcgtgaggtactgacaacaccagcaactcgagagctgggaaactcaaggaggaggaagaaaatcaaaaccaccctactccctggggtgaggaaagaacaggaggggaggaggaggagtgtgctctgcacttgccttgctccaggatggggtggcagcagaggaatgtcacaggtcagcagcctaggcctccagctataaatagtccggagggcccgagaggctcccgcccgtccagcagggctgtcagcttcctgtgtggcagcacctggcacactggctctggccagcattatgctaaaaccctgttactctccaatgaaccagggaggcgggctcctctctgcgcctatcccttgagaattctgtcttaccagtgaagggtggggctgcccagatcaggcagcaggagtgaggggcacagtcaccccaggccttgctgagcccaggtctgggtactgagtgtccagagctgcctccccaggaggttaaggtgggggcaaaggggaagcttcaagcactttgcctacttttgttcactccccagtgcactgtgactcaggccttcccatcaggcctatttgtctacccaataaagcgtgttttttccagaaa

SEQ ID NO: 37 - DNA, 3768 bp, Homo sapiens
attcctaatcctcccaccaaagaaagaggcacagagttcattacttagtgggggccagctgtgatcggccaactgccagctgccttaaaaaggaagaccagtgatgctaggatggagtgaaacccaagaggaagtgccatcatgaggaatcaatgagagatctgtgaagagagagggctgggtgggagcccagaaggatagaacctggaagatcaatatctcccgtgagggaaataacaatggagccaggttctaagtcagtgtctaggtcagactggcaacctgaaccacaccagaggcctataaccccgctagagcctgggccagaaaagacacccatagcccagccagaatcgaagactctgcagggatccaatacccaacagaagcctgcttcaaaccaaagacccctcacccagcaggagacccctgcacaacatgatgctgaatcccagaaggaacctagagcccaacaaaaatctgcttcacaagaggaatttcttgccccacagaagcccgcaccacagcaatcaccttacatccaaagggtgctgctcactcaacaggaagctgcctcccagcagggacctgggctaggaaaagaatctataactcaacaggagccagcattgagacaaagacatgtagcccagccagggcctgggccaggagagccacctccagctcaacaagaagctgaatcaacacctgcggcccaggctaaacctggagccaaaagggagccatctgccccgactgaatctacgtcccaagagacacctgaacagtcagacaagcaaacaacgccagtccagggagccaaatccaagcagggatctttgacagagctgggatttctaacaaaacttcaggaactatccatacagcgatcagccctagagtggaaggcactttctgagtgggtcacagattctgagtcagaatcagatgtgggatcatcttcagacacagattctccagccacgatgggtggaatggtggcccagggagtgaagctaggcttcaaaggaaaatctggttataaagtgatgtcaggatacagtgggacgtcgccacatgagaaaaccagtgctcggaatcacagacactaccaggatacagcctcaaggctcatccacaacatggacctgcgcacaatgacacagtcgctggtgactctggcggaggacaacatagccttcttctcgagccagggtcctggggaaacggcccagcggctgtcaggcgtttttgccggtgtacgggagcaggcgctggggctggagccggccctgggccgcctgctgggtgtggcgcacctctttgacctggacccagagacaccggccaacgggtaccgcagcctagtgcacacagcccgctgctgcctggcgcacctcctgcacaaatcccgctatgtggcctccaaccgccgcagcatcttcttccgcaccagccacaacctggccgagctggaggcctacctggctgccctcacccagctccgcgctctggtctactacgcccagcgcctgctggttaccaatcggccgggggtactcttctttgagggcgacgaggggctcaccgccgacttcctccgggagtatgtcacgctgcataagggatgcttctatggccgctgcctgggcttccagttcacgcctgccatccggccattcctgcagaccatctccattgggctggtgtccttcggggagcactacaaacgcaacgagacaggcctcagtgtggccgccagctctctcttcaccagcggccgctttgccatcgaccccgagctgcgtggggctgagtttgagcggatcacacagaacctggacgtgcacttctggaaagccttctggaacatcaccgagatggaagtgctatcgtctctggccaacatggcatcggccaccgtgagggtaagccgcctgctcagcctgccacccgaagcctttgagatgccactgactgccgaccccacgctcacggtcaccatctcacccccactggcccacacaggccctgggcccgtcctcgtcaggctcatctcctatgacctgcgtgaaggacaggacagtgaggagctcagcagcctgataaagtccaacggccaacggagcctggagctgtggccgcgcccccagcaggcaccccgctcgcggtccctgatagtgcacttccacggcggtggctttgtggcccagacctccagatcccacgagccctacctcaagagctgggcccaggagctgggcgcccccatcatctccatcgactactccctggcccctgaggcccccttcccccgtgcgctggaggagtgcttcttcgcctactgctgggccatcaagcactgcgccctccttggctcaacaggggaacgaatctgccttgcgggggacagtgcaggcgggaacctctgcttcaccgtggctcttcgggcagcagcctacggggtgcgggtgccagatggcatcatggcagcctacccggccacaatgctgcagcctgccgcctctccctcccgcctgctgagcctcatggaccccttgctgcccctcagtgtgctctccaagtgtgtcagcgcctatgctggtgcaaagacggaggaccactccaactcagaccagaaagccctcggcatgatggggctggtgcggcgggacacagccctgctcctccgagacttccgcctgggtgcctcctcatggctcaactccttcctggagttaagtgggcgcaagtcccagaagatgtcggagcccatagcagagccgatgcgccgcagtgtgtctgaagcagcactggcccagccccagggcccactgggcacggattccctcaagaacctgaccctgagggacttgagcctgaggggaaactccgagacgtcgtcggacacccccgagatgtcgctgtcagctgagacacttagcccctccacaccctccgatgtcaacttcttattaccacctgaggatgcaggggaagaggctgaggccaaaaatgagctgagccccatggacagaggcctgggcgtccgtgccgccttccccgagggtttccacccccgacgctccagccagggtgccacacagatgcccctctactcctcacccatagtcaagaaccccttcatgtcgccgctgctggcacccgacagcatgctcaagagcctgccacctgtgcacatcgtggcgtgcgcgctggaccccatgctggacgactcggtcatgctcgcgcggcgactgcgcaacctgggccagccggtgacgctgcgcgtggtggaggacctgccgcacggcttcctgaccctagcggcgctgtgccgcgagacgcgccaggccgcagagctgtgcgtggagcgcatccgcctcgtcctcactcctcccgccggagccgggccgagcggggagacgggggctgcgggggtagacgggggctgcggggggcgacactaaaagcctgttgttcccatctgcgccggcctccgtcatgaatgccttccgggccgggcggaaggggacgcgggctgtgccttacttaagtcgggggtggcaagggggcggggcgggggcccgaaagctgagaccctcgccacggggagggggacgcgcacacacaccggtcaccgagacggctggacctgcacgccaccgctgccttttgctgctgctgctgcggcgaccgccgcagggacggggactggccctcccttgcaggtcggtttggtttgttgtaaataaaagtatttaatta

SEQ ID NO: 38 - DNA, 876 bp, Homo sapiens
tgccagcggcggagtctccaactgggagagctgcagctgccgagaggaggagaacgctgaggtcggtcggaccaacggacgcgctgaccgctgccaactgcagctcgcgctgcctcctgctcgcgccgtgccactaaggtcattcccgcctccgagagcccagagccgagatggaaacggtccaggagctgatccccctggccaaggagatgatggcccagaagcgcaaggggaagatggtgaagctgtacgtgctgggcagcgtgctggccctcttcggcgtggtgctcggcctgatggagactgtgtgcagccccttcacggccgccagacgtctgcgggaccaggaggcagccgtggcggagctgcaggccgccctggagcgacaggctctccagaagcaagccctgcaggagaaaggcaagcagcaggacacggtcctcggcggccgggccctgtccaaccggcagcacgcctcctaggaactgtgggagaccagcggagtgggagggagacgcagtagacagagacagaccgagagaggaatggagagacagagggggcgcgcgcacaggagcctgactccgctgggagagtgcaggagcacgtgctgttttttatttggacttaacttcagagaaaccgctgacatctagaactgacctaccacaagcatccaccaaaggagtttgggattgagttttgctgctgtgcagcactgcattgtcatgacatttccaacactgtgtgaattatctaaatgcgtctaccattttgcactagggaggaaggataaatgctttttatgttattattattaattattacaatgaccaccattttgcattttgaaataaaaaaactttttataccata

SEQ ID NO: 39 - DNA, 5190 bp, Homo sapiens
tctgggggctcggctttgccgcgctcgctgcacttgggcgagagctggaacgtggaccagagctcggatcccatcgcagctaccgcgatgagaggcgctcgcggcgcctgggattttctctgcgttctgctcctactgcttcgcgtccagacaggctcttctcaaccatctgtgagtccaggggaaccgtctccaccatccatccatccaggaaaatcagacttaatagtccgcgtgggcgacgagattaggctgttatgcactgatccgggctttgtcaaatggacttttgagatcctggatgaaacgaatgagaataagcagaatgaatggatcacggaaaaggcagaagccaccaacaccggcaaatacacgtgcaccaacaaacacggcttaagcaattccatttatgtgtttgttagagatcctgccaagcttttccttgttgaccgctccttgtatgggaaagaagacaacgacacgctggtccgctgtcctctcacagacccagaagtgaccaattattccctcaaggggtgccaggggaagcctcttcccaaggacttgaggtttattcctgaccccaaggcgggcatcatgatcaaaagtgtgaaacgcgcctaccatcggctctgtctgcattgttctgtggaccaggagggcaagtcagtgctgtcggaaaaattcatcctgaaagtgaggccagccttcaaagctgtgcctgttgtgtctgtgtccaaagcaagctatcttcttagggaaggggaagaattcacagtgacgtgcacaataaaagatgtgtctagttctgtgtactcaacgtggaaaagagaaaacagtcagactaaactacaggagaaatataatagctggcatcacggtgacttcaattatgaacgtcaggcaacgttgactatcagttcagcgagagttaatgattctggagtgttcatgtgttatgccaataatacttttggatcagcaaatgtcacaacaaccttggaagtagtagataaaggattcattaatatcttccccatgataaacactacagtatttgtaaacgatggagaaaatgtagatttgattgttgaatatgaagcattccccaaacctgaacaccagcagtggatctatatgaacagaaccttcactgataaatgggaagattatcccaagtctgagaatgaaagtaatatcagatacgtaagtgaacttcatctaacgagattaaaaggcaccgaaggaggcacttacacattcctagtgtccaattctgacgtcaatgctgccatagcatttaatgtttatgtgaatacaaaaccagaaatcctgacttacgacaggctcgtgaatggcatgctccaatgtgtggcagcaggattcccagagcccacaatagattggtatttttgtccaggaactgagcagagatgctctgcttctgtactgccagtggatgtgcagacactaaactcatctgggccaccgtttggaaagctagtggttcagagttctatagattctagtgcattcaagcacaatggcacggttgaatgtaaggcttacaacgatgtgggcaagacttctgcctattttaactttgcatttaaaggtaacaacaaagagcaaatccatccccacaccctgttcactcctttgctgattggtttcgtaatcgtagctggcatgatgtgcattattgtgatgattctgacctacaaatatttacagaaacccatgtatgaagtacagtggaaggttgttgaggagataaatggaaacaattatgtttacatagacccaacacaacttccttatgatcacaaatgggagtttcccagaaacaggctgagttttgggaaaaccctgggtgctggagctttcgggaaggttgttgaggcaactgcttatggcttaattaagtcagatgcggccatgactgtcgctgtaaagatgctcaagccgagtgcccatttgacagaacgggaagccctcatgtctgaactcaaagtcctgagttaccttggtaatcacatgaatattgtgaatctacttggagcctgcaccattggagggcccaccctggtcattacagaatattgttgctatggtgatcttttgaattttttgagaagaaaacgtgattcatttatttgttcaaagcaggaagatcatgcagaagctgcactttataagaatcttctgcattcaaaggagtcttcctgcagcgatagtactaatgagtacatggacatgaaacctggagtttcttatgttgtcccaaccaaggccgacaaaaggagatctgtgagaataggctcatacatagaaagagatgtgactcccgccatcatggaggatgacgagttggccctagacttagaagacttgctgagcttttcttaccaggtggcaaagggcatggctttcctcgcctccaagaattgtattcacagagacttggcagccagaaatatcctccttactcatggtcggatcacaaagatttgtgattttggtctagccagagacatcaagaatgattctaattatgtggttaaaggaaacgctcgactacctgtgaagtggatggcacctgaaagcattttcaactgtgtatacacgtttgaaagtgacgtctggtcctatgggatttttctttgggagctgttctctttaggaagcagcccctatcctggaatgccggtcgattctaagttctacaagatgatcaaggaaggcttccggatgctcagccctgaacacgcacctgctgaaatgtatgacataatgaagacttgctgggatgcagatcccctaaaaagaccaacattcaagcaaattgttcagctaattgagaagcagatttcagagagcaccaatcatatttactccaacttagcaaactgcagccccaaccgacagaagcccgtggtagaccattctgtgcggatcaattctgtcggcagcaccgcttcctcctcccagcctctgcttgtgcacgacgatgtctgagcagaatcagtgtttgggtcacccctccaggaatgatctcttcttttggcttccatgatggttattttcttttctttcaacttgcatccaactccaggatagtgggcaccccactgcaatcctgtctttctgagcacactttagtggccgatgatttttgtcatcagccaccatcctattgcaaaggttccaactgtatatattcccaatagcaacgtagcttctaccatgaacagaaaacattctgatttggaaaaagagagggaggtatggactgggggccagagtcctttccaaggcttctccaattctgcccaaaaatatggttgatagtttacctgaataaatggtagtaatcacagttggccttcagaaccatccatagtagtatgatgatacaagattagaagctgaaaacctaagtcctttatgtggaaaacagaacatcattagaacaaaggacagagtatgaacacctgggcttaagaaatctagtatttcatgctgggaatgagacataggccatgaaaaaaatgatccccaagtgtgaacaaaagatgctcttctgtggaccactgcatgagcttttatactaccgacctggtttttaaatagagtttgctattagagcattgaattggagagaaggcctccctagccagcacttgtatatacgcatctataaattgtccgtgttcatacatttgaggggaaaacaccataaggtttcgtttctgtatacaaccctggcattatgtccactgtgtatagaagtagattaagagccatataagtttgaaggaaacagttaataccattttttaaggaaacaatataaccacaaagcacagtttgaacaaaatctcctcttttagctgatgaacttattctgtagattctgtggaacaagcctatcagcttcagaatggcattgtactcaatggatttgatgctgtttgacaaagttactgattcactgcatggctcccacaggagtgggaaaacactgccatcttagtttggattcttatgtagcaggaaataaagtataggtttagcctccttcgcaggcatgtcctggacaccgggccagtatctatatatgtgtatgtacgtttgtatgtgtgtagacaaatatttggaggggtatttttgccctgagtccaagagggtcctttagtacctgaaaagtaacttggctttcattattagtactgctcttgtttcttttcacatagctgtctagagtagcttaccagaagcttccatagtggtgcagaggaagtggaaggcatcagtccctatgtatttgcagttcacctgcacttaaggcactctgttatttagactcatcttactgtacctgttccttagaccttccataatgctactgtctcactgaaacatttaaattttaccctttagactgtagcctggatattattcttgtagtttacctctttaaaaacaaaacaaaacaaaacaaaaaactccccttcctcactgcccaatataaaaggcaaatgtgtacatggcagagtttgtgtgttgtcttgaaagattcaggtatgttgcctttatggtttcccccttctacatttcttagactacatttagagaactgtggccgttatctggaagtaaccatttgcactggagttctatgctctcgcacctttccaaagttaacagattttggggttgtgttgtcacccaagagattgttgtttgccatactttgtctgaaaaattcctttgtgtttctattgacttcaatgatagtaagaaaagtggttgttagttatagatgtctaggtacttcaggggcacttcattgagagttttgtcttggatattcttgaaagtttatatttttataattttttcttacatcagatgtttctttgcagtggcttaatgtttgaaattattttgtggctttttttgtaaatattgaaatgtagcaataatgtcttttgaatattcccaagcccatgagtccttgaaaatattttttatatatacagtaactttatgtgtaaatacataagcggcgtaagtttaaaggatgttggtgttccacgtgttttattcctgtatgttgtccaattgttgacagttctgaagaattctaataaaatgtacatatataaatcaaaaaaaaaaaaaaaa

SEQ ID NO: 40 - DNA, 2238 bp, Homo sapiens
aacagagccaccttctgcgtcctgctgagctctgttctctccagcacctcccaacccactagtgcctggttctcttgctccaccaggaacaagccaccatgtctcgccagtcaagtgtgtccttccggagcgggggcagtcgtagcttcagcaccgcctctgccatcaccccgtctgtctcccgcaccagcttcacctccgtgtcccggtccgggggtggcggtggtggtggcttcggcagggtcagccttgcgggtgcttgtggagtgggtggctatggcagccggagcctctacaacctggggggctccaagaggatatccatcagcactagtggtggcagcttcaggaaccggtttggtgctggtgctggaggcggctatggctttggaggtggtgccggtagtggatttggtttcggcggtggagctggtggtggctttgggctcggtggcggagctggctttggaggtggcttcggtggccctggctttcctgtctgccctcctggaggtatccaagaggtcactgtcaaccagagtctcctgactcccctcaacctgcaaatcgaccccagcatccagagggtgaggaccgaggagcgcgagcagatcaagaccctcaacaataagtttgcctccttcatcgacaaggtgcggttcctggagcagcagaacaaggttctggacaccaagtggaccctgctgcaggagcagggcaccaagactgtgaggcagaacctggagccgttgttcgagcagtacatcaacaacctcaggaggcagctggacagcatcgtgggggaacggggccgcctggactcagagctgagaaacatgcaggacctggtggaagacttcaagaacaagtatgaggatgaaatcaacaagcgtaccactgctgagaatgagtttgtgatgctgaagaaggatgtagatgctgcctacatgaacaaggtggagctggaggccaaggttgatgcactgatggatgagattaacttcatgaagatgttctttgatgcggagctgtcccagatgcagacgcatgtctctgacacctcagtggtcctctccatggacaacaaccgcaacctggacctggatagcatcatcgctgaggtcaaggcccagtatgaggagattgccaaccgcagccggacagaagccgagtcctggtatcagaccaagtatgaggagctgcagcagacagctggccggcatggcgatgacctccgcaacaccaagcatgagatctctgagatgaaccggatgatccagaggctgagagccgagattgacaatgtcaagaaacagtgcgccaatctgcagaacgccattgcggatgccgagcagcgtggggagctggccctcaaggatgccaggaacaagctggccgagctggaggaggccctgcagaaggccaagcaggacatggcccggctgctgcgtgagtaccaggagctcatgaacaccaagctggccctggacgtggagatcgccacttaccgcaagctgctggagggcgaggaatgcagactcagtggagaaggagttggaccagtcaacatctctgttgtcacaagcagtgtttcctctggatatggcagtggcagtggctatggcggtggcctcggtggaggtcttggcggcggcctcggtggaggtcttgccggaggtagcagtggaagctactactccagcagcagtgggggtgtcggcctaggtggtgggctcagtgtggggggctctggcttcagtgcaagcagtggccgagggctgggggtgggctttggcagtggcgggggtagcagctccagcgtcaaatttgtctccaccacctcctcctcccggaagagcttcaagagctaagaacctgctgcaagtcactgccttccaagtgcagcaacccagcccatggagattgcctcttctaggcagttgctcaagccatgttttatccttttctggagagtagtctagaccaagccaattgcagaaccacattctttggttcccaggagagccccattcccagcccctggtctcccgtgccgcagttctatattctgcttcaaatcagccttcaggtttcccacagcatggcccctgctgacacgagaacccaaagttttcccaaatctaaatcatcaaaacagaatccccaccccaatcccaaattttgttttggttctaactacctccagaatgtgttcaataaaatgcttttataatataa

SEQ ID NO: 41 - DNA, 1636 bp, Homo sapiens
acccgagcaccttctcttcactcagccaactgctcgctcgctcacctccctcctctgcaccatgaccacctgcagccgccagttcacctcctccagctccatgaagggctcctgcggcatcgggggcggcatcgggggcggctccagccgcatctcctccgtcctggccggagggtcctgccgcgcccccagcacctacgggggcggcctgtctgtctcatcctcccgcttctcctctgggggagcctgcgggctggggggcggctatggcggtggcttcagcagcagcagcagcagctttggtagtggctttgggggaggatatggtggtggccttggtgctggcttgggtggtggctttggtggtggctttgctggtggtgatgggcttctggtgggcagtgagaaggtgaccatgcagaacctcaatgaccgcctggcctcctacctggacaaggtgcgtgctctggaggaggccaacgccgacctggaagtgaagatccgtgactggtaccagaggcagcggcctgctgagatcaaagactacagtccctacttcaagaccattgaggacctgaggaacaagattctcacagccacagtggacaatgccaatgtccttctgcagattgacaatgcccgtctggccgcggatgacttccgcaccaagtatgagacagagttgaacctgcgcatgagtgtggaagccgacatcaatggcctgcgcagggtgctggacgaactgaccctggccagagctgacctggagatgcagattgagagcctgaaggaggagctggcctacctgaagaagaaccacgaggaggagatgaatgccctgagaggccaggtgggtggagatgtcaatgtggagatggacgctgcacctggcgtggacctgagccgcattctgaacgagatgcgtgaccagtatgagaagatggcagagaagaaccgcaaggatgccgaggaatggttcttcaccaagacagaggagctgaaccgcgaggtggccaccaacagcgagctggtgcagagcggcaagagcgagatctcggagctccggcgcaccatgcagaacctggagattgagctgcagtcccagctcagcatgaaagcatccctggagaacagcctggaggagaccaaaggtcgctactgcatgcagctggcccagatccaggagatgattggcagcgtggaggagcagctggcccagctccgctgcgagatggagcagcagaaccaggagtacaagatcctgctggacgtgaagacgcggctggagcaggagatcgccacctaccgccgcctgctggagggcgaggacgcccacctctcctcctcccagttctcctctggatcgcagtcatccagagatgtgacctcctccagccgccaaatccgcaccaaggtcatggatgtgcacgatggcaaggtggtgtccacccacgagcaggtccttcgcaccaagaactgaggctgcccagccccgctcaggcctaggaggccccccgtgtggacacagatcccactggaagatcccctctcctgcccaagcacttcacagctggaccctgcttcaccctcaccccctcctggcaatcaatacagcttcattatctgagttgcataa

SEQ ID NO: 42 - DNA, 9006 bp, Homo sapiens
aatattcagctgccacttttcaccgttagaagtagagctttttccagacctcctaccttttagtctactttgaaaggtgaaagaaagaacatcgtttcaggaataaaaatgcacagtagtagttatagttaccgtagcagtgattctgtgtttagtaacactaccagcactcgaaccagtcttgattcaaatgaaaatcttctcttggttcattgtggtccaacactgatcaactcttgcattagcttcggcagtgaatcctttgatggacacaggttagaaatgttgcaacagattgccaacagagttcagagggacagtgtcatctgtgaagacaaactgattcttgctggaaatgctcttcagtctgattctaaaagattagaatcaggagtgcagtttcagaatgaagcagaaattgctgggtatatacttgaatgtgagaaccttttacgccagcatgtaattgatgtacagattcttattgatggaaaatactaccaggcagatcaattggtacagagggttgcaaaactgcgtgacgaaattatggccttaaggaacgaatgttcttctgtgtacagcaaaggacgcatactgacaacagaacagacaaagctcatgatatcaggaatcactcaaagtttaaactcaggatttgcacagaccttacaccctagtctgacctcagggctgacccagagtttaacaccttccctaacctcttctagtatgacttctggcctgtcatcagggatgacttcccgcctgactccatctgtcactccagcttatacacctggtttcccatcaggattagttccaaatttcagttcaggagtagagccaaattcattgcaaactttgaagttgatgcagatccgaaaaccccttctaaagtcttctttgctggatcaaaatttaacagaagaagaaatcaatatgaaatttgttcaggatcttttgaattgggttgatgagatgcaggtacaactggaccgcactgagtggggctcagatttgccaagtgttgaaagccatttagaaaatcataaaaatgttcatagagctattgaagaatttgaatctagtctcaaagaagctaaaatcagtgagattcaaatgacagcacctcttaaactgacttatgcagaaaagttgcacagattagagagtcagtatgcaaaactcttgaatacatccaggaatcaagaacggcaccttgatacactccataattttgtaagtcgtgcgactaatgaacttatttggttgaatgaaaaagaagaggaggaagttgcttatgactggagtgagagaaacaccaacatagctaggaaaaaagattatcatgctgaattaatgagagaacttgatcaaaaggaagaaaatattaaatcagttcaggagatagcagagcagctacttctagaaaatcatccagcccggttaactattgaggcctacagagcggcaatgcagacgcagtggagctggatcttacagctctgccagtgtgtggagcagcacataaaggagaacacagcgtatttcgagtttttcaatgatgccaaagaagctactgattacttaaggaatctaaaagatgccattcagcggaagtacagctgtgatagatcaagcagcattcacaagctagaagaccttgttcaggaatcaatggaagagaaagaagaacttctgcagtacaaaagcactatagcaaacctaatgggaaaagcaaaaacaataattcaactgaagccaaggaattctgactgtccactcaaaacttctattccgatcaaagctatctgtgactacagacaaattgagataaccatttacaaagacgatgaatgtgttttggcgaataactctcatcgtgctaaatggaaggtcattagtcctactgggaatgaggctatggtcccatctgtgtgcttcaccgttcctccaccaaacaaagaagcggtggaccttgccaacagaattgagcaacagtatcagaatgtcctgactctttggcatgagtctcacataaacatgaagagtgtagtatcctggcattatctcatcaatgaaattgatagaattcgagctagcaatgtggcttcaataaagacaatgctacctggtgaacatcagcaagttctaagtaatctacaatctcgttttgaagattttctggaagatagccaggaatcccaagtcttttcaggctcagatataacacaactggaaaaggaggttaatgtatgtaagcagtattatcaagaacttcttaaatctgcagaaagagaggagcaagaggaatcagtttataatctctacatctctgaagttcgaaacattagacttcggttagagaactgtgaagatcggctgattagacagattcgaactcccctggaaagagatgatttgcatgaaagtgtgttcagaatcacagaacaggagaaactaaagaaagagctggaacgacttaaagatgatttgggaacaatcacaaataagtgtgaggagtttttcagtcaagcagcagcctcttcatcagtccctaccctacgatcagagcttaatgtggtccttcagaacatgaaccaagtctattctatgtcttccacttacatagataagttgaaaactgttaacttggtgttaaaaaacactcaagctgcagaagccctcgtaaaactctatgaaactaaactgtgtgaagaagaagcagttatagctgacaagaataatattgagaatctaataagtactttaaagcaatggagatctgaagtagatgaaaagagacaggtattccatgccttagaggatgagttgcagaaagctaaagccatcagtgatgaaatgtttaaaacgtataaagaacgggaccttgattttgactggcacaaagaaaaagcagatcaattagttgaaaggtggcaaaatgttcatgtgcagattgacaacaggttacgggacttagagggcattggcaaatcactgaagtactacagagacacttaccatcctttagatgattggatccagcaggttgaaactactcagagaaagattcaggaaaatcagcctgaaaatagtaaaaccctagccacacagttgaatcaacagaagatgctggtgtccgaaatagaaatgaaacagagcaaaatggacgagtgtcaaaaatatgcagaacagtactcagctacagtgaaggactatgaattacaaacaatgacctaccgggccatggtagattcacaacaaaaatctccagtgaaacgccgaagaatgcagagttcagcagatctcattattcaagagttcatggacctaaggactcgatatactgccctggtcactctcatgacacaatatattaaatttgctggtgattcattgaagaggctggaagaggaggagattaaaaggtgtaaggagacttctgaacatggggcatattcagatctgcttcagcgtcagaaggcaacagtgcttgagaatagcaaacttacaggaaagataagtgagttggaaagaatggtagctgaactaaagaaacaaaagtcccgagtagaggaagaacttccgaaggtcagggaggctgcagaaaatgaattgagaaagcagcagagaaatgtagaagatatctctctgcagaagataagggctgaaagtgaagccaagcagtaccgcagggaacttgaaaccattgtgagagagaaggaagccgctgaaagagaactggagcgggtgaggcagctcaccatagaggccgaggctaaaagagctgccgtggaagagaacctcctgaattttcgcaatcagttggaggaaaacacctttaccagacgaacactggaagatcatcttaaaagaaaagatttaagtctcaatgatttggagcaacaaaaaaataaattaatggaagaattaagaagaaagagagacaatgaggaagaactcttgaagctgataaagcagatggaaaaagaccttgcatttcagaaacaggtagcagagaaacagttgaaagaaaagcagaaaattgaattggaagcaagaagaaaaataactgaaattcagtatacatgtagagaaaatgcattgccagtgtgtccgatcacacaggctacatcatgcagggcagtaacgggtctccagcaagaacatgacaagcagaaagcagaagaactcaaacagcaggtagatgaactaacagctgccaatagaaaggctgaacaagacatgagagagctgacatatgaacttaatgccctccagcttgaaaaaacgtcatctgaggaaaaggctcgtttgctaaaagataaactagatgaaacaaataatacactcagatgccttaagttggagctggaaaggaaggatcaggcggagaaagggtattctcaacaactcagagagcttggtaggcaattgaatcaaaccacaggtaaagctgaagaagccatgcaagaagctagtgatctcaagaaaataaagcgcaattatcagttagaattagaatctcttaatcatgaaaaagggaaactacaaagagaagtagacagaatcacaagggcacatgctgtagctgagaagaatattcagcatttaaattcacaaattcattcttttcgagatgagaaagaattagaaagactacaaatctgccagagaaaatcagatcatctaaaagaacaatttgagaaaagccatgagcagttgcttcaaaatatcaaagctgaaaaagaaaataatgataaaatccaaaggctcaatgaagaattggagaaaagtaatgagtgtgcagagatgctaaaacaaaaagtagaggagcttactaggcagaataatgaaaccaaattaatgatgcagagaattcaggcagaatcagagaatatagttttagagaaacaaactatccagcaaagatgtgaagcactgaaaattcaggcagatggttttaaagatcagctacgcagcacaaatgaacacttgcataaacagacaaaaacagagcaggattttcaaagaaaaattaaatgcctagaagaagacctggcgaaaagtcaaaatttggtaagtgaatttaagcaaaagtgtgaccaacagaacattatcatccagaataccaagaaagaagttagaaatctgaatgcggaactgaatgcttccaaagaagagaagcgacgcggggagcagaaagttcagctacaacaagctcaggtgcaagagttaaataacaggttgaaaaaagtacaagacgaattacacttaaagaccatagaggagcagatgacccacagaaagatggttctgtttcaggaagaatctggtaaattcaaacaatcagcagaggagtttcggaagaagatggaaaaattaatggagtccaaagtcatcactgaaaatgatatttcaggcattaggcttgactttgtgtctcttcaacaagaaaactctagagcccaagaaaatgctaagctttgtgaaacaaacattaaagaacttgaaagacagcttcaacagtatcgtgaacaaatgcagcaagggcagcacatggaagcaaatcattaccaaaaatgtcagaaacttgaggatgagctgatagcccagaagcgtgaggttgaaaacctgaagcaaaaaatggaccaacagatcaaagagcatgaacatcaattagttttgctccagtgtgaaattcaaaaaaagagcacagccaaagactgtaccttcaaaccagattttgagatgacagtgaaggagtgccagcactctggagagctgtcctctagaaacactggacaccttcacccaacacccagatcccctctgttgagatggactcaagaaccacagccattggaagagaagtggcagcatcgggttgttgaacagatacccaaagaagtccaattccagccaccaggggctccactcgagaaagagaaaagccagcagtgttactctgagtacttttctcagacaagcaccgagttacagataacttttgatgagacaaaccccattacaagactgtctgaaattgagaagataagagaccaagccctgaacaattctagaccacctgttaggtatcaagataacgcatgtgaaatggaactggtgaaggttttgacacccttagagatagctaagaacaagcagtatgatatgcatacagaagtcacaacattaaaacaagaaaagaacccagttcccagtgctgaagaatggatgcttgaagggtgcagagcatctggtggactcaagaaaggggatttccttaagaagggcttagaaccagagaccttccagaactttgatggtgatcatgcatgttcagtcagggatgatgaatttaaattccaagggcttaggcacactgtgactgccaggcagttggtggaagctaagcttctggacatgagaacaattgagcagctgcgactcggtcttaagactgttgaagaagttcagaaaactcttaacaagtttctgacgaaagccacctcaattgcagggctttacctagaatctacaaaagaaaagatttcatttgcctcagcggccgagagaatcataatagacaaaatggtggctttggcatttttagaagctcaggctgcaacaggttttataattgatcccatttcaggtcagacatattctgttgaagatgcagttcttaaaggagttgttgaccccgaattcagaattaggcttcttgaggcagagaaggcagctgtgggatattcttattcttctaagacattgtcagtgtttcaagctatggaaaatagaatgcttgacagacaaaaaggtaaacatatcttggaagcccagattgccagtgggggtgtcattgaccctgtgagaggcattcgtgttcctccagaaattgctctgcagcaggggttgttgaataatgccatcttacagtttttacatgagccatccagcaacacaagagttttccctaatcccaataacaagcaagctctgtattactcagaattactgcgaatgtgtgtatttgatgtagagtcccaatgctttctgtttccatttggggagaggaacatttccaatctcaatgtcaagaaaacacatagaatttctgtagtagatactaaaacaggatcagaattgaccgtgtatgaggctttccagagaaacctgattgagaaaagtatatatcttgaactttcagggcagcaatatcagtggaaggaagctatgttttttgaatcctatgggcattcttctcatatgctgactgatactaaaacaggattacacttcaatattaatgaggctatagagcagggaacaattgacaaagccttggtcaaaaagtatcaggaaggcctcatcacacttacagaacttgctgattctttgctgagccggttagtccccaagaaagatttgcacagtcctgttgcagggtattggctgactgctagtggggaaaggatctctgtactaaaagcctcccgtagaaatttggttgatcggattactgccctccgatgccttgaagcccaagtcagtacagggggcataattgatcctcttactggcaaaaagtaccgggtggccgaagctttgcatagaggcctggttgatgaggggtttgcccagcagctgcgacagtgtgaattagtaatcacagggattggccatcccatcactaacaaaatgatgtcagtggtggaagctgtgaatgcaaatattataaataaggaaatgggaatccgatgtttggaatttcagtacttgacaggagggttgatagagccacaggttcactctcggttatcaatagaagaggctctccaagtaggtattatagatgtcctcattgccacaaaactcaaagatcaaaagtcatatgtcagaaatataatatgccctcagacaaaaagaaagttgacatataaagaagccttagaaaaagctgattttgatttccacacaggacttaaactgttagaagtatctgagcccctgatgacaggaatttctagcctctactattcttcctaatgggacatgtttaaataactgtgcaaggggtgatgcaggctggttcatgccactttttcagagtatgatgatatcggctacatatgcagtctgtgaattatgtaacatactctatttcttgagggctgcaaattgctaagtgctcaaaatagagtaagttttaaattgaaaattacataagatttaatgcccttcaaatggtttcatttagccttgagaatggttttttgaaacttggccacactaaaatgtttttttttttacgtagaatgtgggataaacttgatgaactccaagttcacagtgtcatttcttcagaactccccttcattgaatagtgatcatttattaaatgataaattgcactcgctgaaagagcacgtcatgaagcaccatggaatcaaagagaaagatataaattcgttcccacagccttcaagctgcagtgttttagattgcttcaaaaaatgaaaaagttttgcctttttctgtatatagtgaccttctttgcatattaaaatgtttaccacaatgtcccatttctagttaagtcttcgcacttgaaagctaacattatgaatattatgtgttggaggaggggaaggattttcttcattctgtgtattttccttacatgtacagtagacgttctctattctatcagccttctatggtacctttttgtcaggacaattaggattgtaatgctaatgcaaaggcagcaattcaaagatcttctagtgcctcatgaataaagttgagatttaaaatttgtaacattgatggaacagctgggaggttagaccaatcattaaggaatgtatgccatagctttctttgctaccataaacattttggaggtgcatctgctatgtgacatggtaaatatggttaagtgaatgaataaaatgttttagtaacctgtgtgtgatgaaaaaaaaaaaaaaa

SEQ ID NO: 43 - DNA, 1712 bp, Homo sapiens
ctggtacctcctgccagcatctcttgggtttgctgagaactcacgggctccagctacctggccatgaccaccacatttctgcaaacttcttcctccacctttgggggtggctcaacccgagggggttccctcctggctgggggaggtggctttggtggggggagtctctctgggggaggtggaagccgaagtatctcagcttcttctgctaggtttgtctcttcagggtcaggaggaggatatgggggtggcatgagggtctgtggctttggtggaggggctggtagtgttttcggtggaggctttggagggggcgttggtgggggttttggtggtggctttggtggtggcgatggtggtctcctctctggcaatgagaaaattaccatgcagaacctcaatgaccgcctggcctcctacctggacaaggtacgtgccctggaggaggccaatgctgacctggaggtgaagatccatgactggtaccagaagcagaccccaaccagcccagaatgcgactacagccaatacttcaagaccattgaagagctccgggacaagatcatggccaccaccatcgacaactcccgggtcatcctggagatcgacaatgccaggctggctgcggacgacttcaggctcaagtatgagaatgagctggccctgcgccagggcgttgaggctgacatcaacggcttgcgccgagtcctggatgagctgaccctggccaggactgacctggagatgcagatcgagggcctgaatgaggagctagcctacctgaagaagaaccacgaagaggagatgaaggagttcagcagccagctggccggccaggtcaatgtggagatggacgcagcaccgggtgtggacctgacccgtgtgctggcagagatgagggagcagtacgaggccatggcggagaagaaccgccgggatgtcgaggcctggttcttcagcaagactgaggagctgaacaaagaggtggcctccaacacagaaatgatccagaccagcaagacggagatcacagacctgagacgcacgatgcaggagctggagatcgagctgcagtcccagctcagcatgaaagctgggctggagaactcactggccgagacagagtgccgctatgccacgcagctgcagcagatccaggggctcattggtggcctggaggcccagctgagtgagctccgatgcgagatggaggctcagaaccaggagtacaagatgctgcttgacataaagacacggctggagcaggagatcgctacttaccgcagcctgctcgagggccaggatgccaagatggctggcattgccatcagggaagcctcttcaggaggtggtggtagcagcagcaatttccacatcaatgtagaagagtcagtggatggacaggtggtttcttcccacaagagagaaatctaagtgtctattgcaggagaaacgtcccttgccactccccactctcatcaggccaagtggaggactggccagagggcctgcacatgcaaactccagtccctgccttcagagagctgaaaagggtccctcggtcttttatttcagggctttgcatgcgctctattccccctctgcctctccccaccttctttggagcaaggagatgcagctgtattgtgtaacaagctcatttgtacagtgtctgttcatgtaataaagaattacttttccttttgcaaata

SEQ ID NO: 44 - DNA, 4275 bp, Homo sapiens
gagcagagtttcagttttggcagcagcgtccagtgccctgccagtagctcctagagaggcaggggttaccaactggccagcaggctgtgtccctgaagtcagatcaacgggagagaaggaagtggctaaaacattgcacaggagaagtcggcctgagtggtgcggcgctcgggacccaccagcaatgctgctcttcgtgctcacctgcctgctggcggtcttcccagccatctccacgaagagtcccatatttggtcccgaggaggtgaatagtgtggaaggtaactcagtgtccatcacgtgctactacccacccacctctgtcaaccggcacacccggaagtactggtgccggcagggagctagaggtggctgcataaccctcatctcctcggagggctacgtctccagcaaatatgcaggcagggctaacctcaccaacttcccggagaacggcacatttgtggtgaacattgcccagctgagccaggatgactccgggcgctacaagtgtggcctgggcatcaatagccgaggcctgtcctttgatgtcagcctggaggtcagccagggtcctgggctcctaaatgacactaaagtctacacagtggacctgggcagaacggtgaccatcaactgccctttcaagactgagaatgctcaaaagaggaagtccttgtacaagcagataggcctgtaccctgtgctggtcatcgactccagtggttatgtaaatcccaactatacaggaagaatacgccttgatattcagggtactggccagttactgttcagcgttgtcatcaaccaactcaggctcagcgatgctgggcagtatctctgccaggctggggatgattccaatagtaataagaagaatgctgacctccaagtgctaaagcccgagcccgagctggtttatgaagacctgaggggctcagtgaccttccactgtgccctgggccctgaggtggcaaacgtggccaaatttctgtgccgacagagcagtggggaaaactgtgacgtggtcgtcaacaccctggggaagagggccccagcctttgagggcaggatcctgctcaacccccaggacaaggatggctcattcagtgtggtgatcacaggcctgaggaaggaggatgcagggcgctacctgtgtggagcccattcggatggtcagctgcaggaaggctcgcctatccaggcctggcaactcttcgtcaatgaggagtccacgattccccgcagccccactgtggtgaagggggtggcaggaggctctgtggccgtgctctgcccctacaaccgtaaggaaagcaaaagcatcaagtactggtgtctctgggaaggggcccagaatggccgctgccccctgctggtggacagcgaggggtgggttaaggcccagtacgagggccgcctctccctgctggaggagccaggcaacggcaccttcactgtcatcctcaaccagctcaccagccgggacgccggcttctactggtgtctgaccaacggcgatactctctggaggaccaccgtggagatcaagattatcgaaggagaaccaaacctcaaggtaccagggaatgtcacggctgtgctgggagagactctcaaggtcccctgtcactttccatgcaaattctcctcgtacgagaaatactggtgcaagtggaataacacgggctgccaggccctgcccagccaagacgaaggccccagcaaggccttcgtgaactgtgacgagaacagccggcttgtctccctgaccctgaacctggtgaccagggctgatgagggctggtactggtgtggagtgaagcagggccacttctatggagagactgcagccgtctatgtggcagttgaagagaggaaggcagcggggtcccgcgatgtcagcctagcgaaggcagacgctgctcctgatgagaaggtgctagactctggttttcgggagattgagaacaaagccattcaggatcccaggctttttgcagaggaaaaggcggtggcagatacaagagatcaagccgatgggagcagagcatctgtggattccggcagctctgaggaacaaggtggaagctccagagcgctggtctccaccctggtgcccctgggcctggtgctggcagtgggagccgtggctgtgggggtggccagagcccggcacaggaagaacgtcgaccgagtttcaatcagaagctacaggacagacattagcatgtcagacttcgagaactccagggaatttggagccaatgacaacatgggagcctcttcgatcactcaggagacatccctcggaggaaaagaagagtttgttgccaccactgagagcaccacagagaccaaagaacccaagaaggcaaaaaggtcatccaaggaggaagccgagatggcctacaaagacttcctgctccagtccagcaccgtggccgccgaggcccaggacggcccccaggaagcctagacggtgtcgccgcctgctccctgcacccatgacaatcaccttcagaatcatgtcgatcctggggccctcagctcctggggaccccactccctgctctaacacctgcctaggtttttcctactgtcctcagaggcgtgctggtcccctcctcagtgacatcaaagcctggcctaattgttcctattggggatgagggtggcatgaggaggtcccacttgcaacttctttctgttgagagaacctcaggtacggagaagaatagaggtcctcatgggtcccttgaaggaagagggaccagggtgggagagctgattgcagaaaggagagacgtgcagcgcccctctgcacccttatcatgggatgtcaacagaatttttccctccactccatccctccctcccgtccttcccctcttcttctttccttccatcaaaagatgtatttgaattcatactagaattcaggtgctttgctagatgctgtgacaggtatgccaccaacactgctcacagcctttctgaggacaccagtgaaagaagccacagctcttcttggcgtatttatactcactgagtcttaacttttcaccaggggtgctcacctctgcccctattgggagaggtcataaaatgtctcgagtcctaaggccttaggggtcatgtatgatgagcatacacacaggtaattataaacccacattcttaccatttcacacataagaaaattgaggtttggaagagtgaagcgtttttctttttcttttttttttttgagacggagtctctcactgtcgcccaggctggagtgcagtggcgcaatctcggctcactgcaacctccgcctcccaggttgacaccattctcctgcctcaccctcccaagtagctgggactacaggcgcctgccagcacgcctggctaattttttgtatttttagtagagacagggtttcaccgtgttagccaggatggtctcgatctcctgacctcgtgatccgcctgcctctgcctcccaaagtgctgggattacaggcgtgagccaccgcgtccggcctctttttttcttttcttttttttgagacaaagtctcactgtgtcacccagactggaatgcagtgacacaatctcggctcactgaaacctctgccttccaggttcaagctattctcatgcctcagcctctcaagtagctgggactacagatgtgggccaccatgtctggctaattttttttttttttttttttttttgtagagacagggtttcgccatgttgacgagactggtctcgaactcctggcctcaagtgatctgccgcctcagcttctcaaagtactgggattatataggcatgagccactgagcctggccctgaagcgtttttctcaaaggccctcagtgagataaattagatttggcatctcctgtcctgggccagggatctctctacaagagcccctgcccctctgttggaggcacagttttagaataaggaggaggagggagaagagaaaatgtaaaggagggagatctttcccaggccgcaccatttctgtcactcacatggacccaagataaaagaatggccaaaccctcacaacccctgatgtttgaagagttccaagttgaagggaaacaaagaagtgtttgatggtgccagagaggggctgctctccagaaagctaaaatttaatttcttttttcctctgagttctgtacttcaaccagcctacaagctggcacttgctaacaaatcagaaatatgacaattaatgattaaagactgtgattgccaccaa

SEQ ID NO: 45 - DNA, 1977 bp, Homo sapiens
aaacgggaacagccctggctgagggagctgcagcgcagcagagtatctgacggcgccaggttgcgtaggtgcggcacgaggagttttcccggcagcgaggaggtcctgagcagcatggcccggaggagcgccttccctgccgccgcgctctggctctggagcatcctcctgtgcctgctggcactgcgggcggaggccgggccgccgcaggaggagagcctgtacctatggatcgatgctcaccaggcaagagtactcataggatttgaagaagatatcctgattgtttcagaggggaaaatggcaccttttacacatgatttcagaaaagcacaacagagaatgccagctattcctgtcaatatccattccatgaattttacctggcaagctgcagggcaggcagaatacttctatgaattcctgtccttgcgctccctggataaaggcatcatggcagatccaaccgtcaatgtccctctgctgggaacagtgcctcacaaggcatcagttgttcaagttggtttcccatgtcttggaaaacaggatggggtggcagcatttgaagtggatgtgattgttatgaattctgaaggcaacaccattctccaaacacctcaaaatgctatcttctttaaaacatgtcaacaagctgagtgcccaggcgggtgccgaaatggaggcttttgtaatgaaagacgcatctgcgagtgtcctgatgggttccacggacctcactgtgagaaagccctttgtaccccacgatgtatgaatggtggactttgtgtgactcctggtttctgcatctgcccacctggattctatggagtgaactgtgacaaagcaaactgctcaaccacctgctttaatggagggacctgtttctaccctggaaaatgtatttgccctccaggactagagggagagcagtgtgaaatcagcaaatgcccacaaccctgtcgaaatggaggtaaatgcattggtaaaagcaaatgtaagtgttccaaaggttaccagggagacctctgttcaaagcctgtctgcgagcctggctgtggtgcacatggaacctgccatgaacccaacaaatgccaatgtcaagaaggttggcatggaagacactgcaataaaaggtacgaagccagcctcatacatgccctgaggccagcaggcgcccagctcaggcagcacacgccttcacttaaaaaggccgaggagcggcgggatccacctgaatccaattacatctggtgaactccgacatctgaaacgttttaagttacaccaagttcatagcctttgttaacctttcatgtgttgaatgttcaaataatgttcattacacttaagaatactggcctgaattttattagcttcattataaatcactgagctgatatttactcttccttttaagttttctaagtacgtctgtagcatgatggtatagattttcttgtttcagtgctttgggacagattttatattatgtcaattgatcaggttaaaattttcagtgtgtagttggcagatattttcaaaattacaatgcatttatggtgtctgggggcaggggaacatcagaaaggttaaattgggcaaaaatgcgtaagtcacaagaatttggatggtgcagttaatgttgaagttacagcatttcagattttattgtcagatatttagatgtttgttacatttttaaaaattgctcttaatttttaaactctcaatacaatatattttgaccttaccattattccagagattcagtattaaaaaaaaaaaaattacactgtggtagtggcatttaaacaatataatatattctaaacacaatgaaatagggaatataatgtatgaactttttgcattggcttgaagcaatataatatattgtaaacaaaacacagctcttacctaataaacattttatactgtttgtatgtataaaataaaggtgctgctttagttttctga

SEQ ID NO: 46 - DNA, 3532 bp, Homo sapiens
acactgactgaacagacttttagtggggttacctggctaacagcagcagcggcaacggcagcagcagcagcagcagcagcagcagcagcagcagggctcctgggataactcaggcatagttcaacactatgggtcctcctctgaagctcttcaaaaaccagaaataccaggaactgaagcaggaatgcatcaaagacagcagacttttctgtgatccaacatttctgcctgagaatgattctcttttctacaaccgactgcttcctggaaaggtggtgtggaaacgtccccaggacatctgtgatgacccccatctgattgtgggcaacattagcaaccaccagctgacccaagggagactggggcacaagccaatggtttctgcattttcctgtttggctgttcaggagtctcattggacaaagacaattcccaaccataaggaacaggaatgggaccctcaaaaaacagaaaaatacgctgggatatttcactttcgtttctggcattttggagaatggactgaagtggtgattgatgacttgttgcccaccattaacggagatctggtcttctctttctccacttccatgaatgagttttggaatgctctgctggaaaaagcttatgcaaagctgctaggctgttatgaggccctggatggtttgaccatcactgatattattgtggacttcacgggcacattggctgaaactgttgacatgcagaaaggaagatacactgagcttgttgaggagaagtacaagctattcggagaactgtacaaaacatttaccaaaggtggtctgatctgctgttccattgagtctcccaatcaggaggagcaagaagttgaaactgattggggtctgctgaagggccatacctataccatgactgatattcgcaaaattcgtcttggagagagacttgtggaagtcttcagtgctgagaaggtgtatatggttcgcctgagaaaccccttgggaagacaggaatggagtggcccctggagtgaaatttctgaagagtggcagcaactgactgcatcagatcgcaagaacctggggcttgttatgtctgatgatggagagttttggatgagcttggaggacttttgccgcaactttcacaaactgaatgtctgccgcaatgtgaacaaccctatttttggccgaaaggagctggaatcggtgttgggatgctggactgtggatgatgatcccctgatgaaccgctcaggaggctgctataacaaccgtgataccttcctgcagaatccccagtacatcttcactgtgcctgaggatgggcacaaggtcattatgtcactgcagcagaaggacctgcgcacttaccgccgaatgggaagacctgacaattacatcattggctttgagctcttcaaggtggagatgaaccgcaaattccgcctccaccacctctacatccaggagcgtgctgggacttccacctatattgacacccgcacagtgtttctgagcaagtacctgaagaagggcaactatgtgcttgtcccaaccatgttccagcatggtcgcaccagcgagtttctcctgagaatcttctctgaagtgcctgtccagctcagggaactgactctggacatgcccaaaatgtcctgctggaacctggctcgtggctacccgaaagtagttactcagatcactgttcacagtgctgaggacctggagaagaagtatgccaatgaaactgtaaacccatatttggtcatcaaatgtggaaaggaggaagtccgttctcctgtccagaagaatacagttcatgccatttttgacacccaggccattttctacagaaggaccactgacattcctattatagtacaggtctggaacagccgaaaattctgtgatcagttcttggggcaggttactctggatgctgaccccagcgactgccgtgatctgaagtctctgtacctgcgtaagaagggtggtccaactgccaaagtcaagcaaggccacatcagcttcaaggttatttccagcgatgatctcactgagctctaaatctgcaatcccagagaatcctgacaaagcgtgccacccttttattttccgtcaggtgccaggtcttagttaagattcacaatctttagaaagaatgagattcacaataattaactcttcctctcttctgataaattccccatacctcccaatccaagtagcatctgtagctacataacctatatacctccagcagctggacatggggaggcgacagtcctatctagacatcatacacatttgccaagaaaggatctctggggcttccgggggtgagattcaagtaggacaataacaagaggctggacaccctacagatgtctttgatgttttcagttgtttgatatatctcccctgtagggcatgttgaggaaggaggagggctgatcaaggccaagctggtctagcctgacatcctagctcctgactgaacactatagacttcccagcagcatttcacccagcagccagagccggctttaagtccccaacccttacagacaccactgccaccaccaccaaccacgaccaccaccaccaccaccactcaccaccatcatcacctccggaaagtgtagtcctgccctaacccaagtcacccccgacagtaaattttaccttcatgttgagaaagcttcctggtgcttaatcaagagctggagttcaatgagtcctagacagtgagaggggcctgagcttcagctcaatggaagcctgctgtgtgccacaagacggaaaagtggaagaagctgcagtgggagacaaagcctcggtcccccacccatccacacacacctacactcacacacgcgcacatgggcgcgcacgaactaccattcaggcagtcagtgggcaagaggaaagataagtaagtaccatacacacctaaaagatgagagaattcatccagacatattacagccagtttggggcccctgactgcaatgtgaaacctctcgctgctgctaggtttacaaacaagcccattgtcctgtgcctcctaatatcatttgtactgaagaccccatctggggacttgagactttggtcccagcccagactcctcagacttttctctcagttgggatgcttcactcgctgggggtgtttgtttgccctctcatttttcagtacttctacagaattttctctagagtcagtcattatgaaatgtacttccctccatcttaacctatcaactttctgcccctccttcaaggcccagtataaatgccacctcctccatgaagccttccctaattccaccccaaacccccaccttcaacaatatttcaacgcttctgcaatgatgaaaaagaaacatagttgtagtacttagcctacctagaccagcaagcattcatttttagctcgctcattttttaccatgttttccagtctgtttaacttctgcagtgccttcactacactgccttacataaaccaaatcacaataaagttcatattcagtacattga

SEQ ID NO: 47 - DNA, 7355 bp, Homo sapiens
agtctgcgggcctccggggcagcggcgaggccggagcgtcgcggcggagaggacgagaccgggacaagaccagggcaggagggagccggccagccgcgagaaccccgcacgcccggcaagatgctgtcctggcggctgcagacgggccccgagaaggccgagctccaggagctcaacgcccggctctatgactacgtgtgtcgggtgcgggagctggagcgcgaaaacctactcctggaggaggagctgcgcggccggcgcgggcgagagggcctgtgggccgaggggcaggcccgctgcgccgaggaggcgcgcagcttgcggcagcagctggacgagctgagctgggccactgcgctggcggagggcgagcgggacgctctgcggcgcgagctgcgggagctgcagcgcctggatgcggaggagcgcgccgcccgcggccgcctggacgccgagctgggtgcgcagcagcgcgagctgcaggaggcgctgggcgcgcgcgccgccctcgaggcgctgctgggccggctgcaggccgagcgccgaggcctcgacgcggcccacgaacgcgacgtgagggagctgcgcgcgcgcgccgccagccttaccatgcatttccgcgcccgcgccaccggccccgccgcgccgccgccacgcctgcgggaggtgcacgacagctacgcactgctggtggccgagtcgtggcgggagacggtgcagctgtacgaggacgaggtgcgcgagctggaggaggcgctgcggcgcggccaggagagcagactccaggcggaggaagagacgcggctgtgcgcgcaggaggcagaggcgctgcggcgcgaggcgctcgggttggagcagctgcgcgcgcggctggaggacgcgctgctgcggatgcgcgaggagtacgggatacaggccgaggagcggcagagagtgattgactgcctggaggatgagaaggcaaccctcaccttggccatggctgactggctgcgggactatcaggacctcctgcaggtgaagaccggcctcagtctggaggtggcgacctaccgggccttattggaaggagaaagtaatccagagatagtgatctgggctgagcacgttgaaaacatgccgtcagaattcagaaacaaatcctatcactataccgactcactactacagagggaaaatgaaaggaatctattttcaaggcagaaagcacctttggcaagtttcaatcacagctcggcactgtattctaacctgtcagggcaccgtggatctcagacgggcacatctattggaggtgatgccagaagaggcttcttgggctcgggatattcttcctcggccactacccagcaggaaaactcatacggaaaagccgtcagcagtcaaaccaacgtcagaactttctctccaacctatggccttttaagaaatactgaggctcaagtgaaaacattccctgacagaccaaaagccggagatacaagggaggtccccgtttacataggtgaagattccacaattgcccgcgagtcgtaccgggatcgccgagacaaggtggcagcaggtgcttcggaaagcacacggtcaaatgagaggaccgtcattctgggaaagaaaacagaagtgaaagccacgagggagcaagaaagaaacagaccagaaaccatccgaacaaagccagaagagaaaatgttcgattctaaagagaaggcttccgaggagagaaacctaagatgggaagaattgacaaagttagataaggaagcgagacagagagaaagccagcagatgaaggagaaggctaaggagaaggactcaccgaaggagaagagcgtgcgagagagagaggtgccgattagtctagaagtatcccaggacagaagagcagaggtgtccccgaaaggtttgcagacgcctgtgaaggatgctggtggtgggaccggtagagaggcagaagcaagagagctacggttcaggttgggcaccagtgatgccactggttctctgcaaggcgattccatgacagaaaccgtagcagaaaacatcgttaccagtatcctgaagcagttcactcagtctccagagacagaagcatctgctgattcttttccagacacaaaagtcacttacgtggacaggaaagagcttcctggggaaaggaaaacaaagactgaaatagttgtggagtctaaactgactgaggatgttgatgtttccgatgaagctggcctggactaccttttaagcaaggatattaaggaagtggggctgaaaggcaagtcagccgagcagatgataggagacatcatcaacctcggcctgaaagggagggaggggagagcaaaggtcgtcaacgtggagatcgtggaggagcccgtgagttatgtcagcggggagaagccggaggagttttccgtcccattcaaagtggaggaggtcgaagatgtgtcgccaggcccctgggggttggttaaggaggaggaaggttatggagaaagcgatgtcacattctcagttaatcagcatcgaaggaccaagcagcctcaggagaacacgactcacgtggaagaagtgacagaggcaggtgattcagagggcgagcagagttattttgtgtccactccagatgaacaccccggggggcacgacagagatgacggctcggtgtacgggcagatccacatcgaggaggaatccaccatcaggtactcttggcaggatgaaatcgtgcaggggactcgaaggaggacacagaaggacggtgcagtgggcgagaaggttgtgaagcccttggatgtcccagcgccctctctggagggggacctgggttccactcactggaaagaacaagctagaagcggtgaatttcatgccgaacccacagtcattgaaaaagaaattaaaataccccacgaattccacacctccatgaagggcatctcctccaaggagccccggcagcagctggtggaggtcatcgggcagctggaggaaacccttcccgagcgcatgagggaggagctgtccgccctcaccagagaggggcagggtgggccggggagcgtttccgtggatgtcaagaaggtccagggtgctggtggcagttccgtgaccctggttgctgaagtcaacgtctcacaaactgtggatgccgatcggttagacctggaggagctgagcaaagatgaggccagtgagatggagaaggctgtggagtcggtggttcgggagagcctgagcaggcaacgcagcccagcgcctggcagcccagatgaggaaggtggagcggaggccccggctgctggcattcgctttaggcgttgggccacccgggagctgtacatcccttcaggcgagagcgaggttgctggtggggcctctcacagctcgggacagcgcactccccagggcccagtgtcggccactgtggaggtcagcagccccacaggctttgcccagtcacaggtgctggaggatgtgagccaggctgcaaggcacataaaactcggcccctctgaagtctggaggactgagcgaatgtcatatgaaggacccactgcagaagtggtggaggtaagtgcgggaggtgacctaagtcaggcagcgagcccgaccggagccagccggtctgtgaggcatgtcacgctgggtcccggtcaaagtccactgtccagagaagtcatcttcctaggccctgcccctgcctgtccagaggcatggggctcgccagaacctggcccagcagagtcttctgcagatatggacggatcagggaggcacagcacatttggctgcagacaatttcatgctgaaaaggagattatttttcagggccccatttctgctgcagggaaggttggtgattattttgcaacagaagagtcagtgggtacccagacttctgtcaggcaactccagttaggccctaaagaagggttcagtgggcaaatccagttcacagctccactttcagacaaggtggagttgggtgtcataggagattctgtacacatggaagggttgccagggagcagcacatccatcaggcacatcagcattgggcctcagaggcatcagaccacccagcagatagtttaccatgggctggttccccaactgggggaatctggtgactcagagagcactgtgcacggagagggctcagcagatgtgcaccaggccactcacagtcatacctcgggtagacaaaccgttatgactgaaaagagcaccttccaaagtgtcgtttctgaatctccccaggaggatagtgcagaggacacatcaggggcagaaatgacatcgggtgttagcagatcctttaggcacattcgactaggtcctacagaaacggaaacctctgaacacattgccatccgtggacccgtgtccagaacatttgtgcttgctggttcagcggactcccctgagctaggcaagttagcagacagcagcagaacgctaaggcacattgcaccagggcccaaagaaacttcgtttacctttcagatggatgtgagtaacgtagaggcgatccgcagccggacacaggaagcgggagctctcggtgtgtctgaccgtggttcctggagagacgcggacagtaggaatgaccaggcagttggtgtgagctttaaggcctctgctggggaaggagaccaggcccacagagaacagggcaaggagcaggccatgtttgataagaaggtgcagctccagagaatggtagaccaaaggtcggtgatttcagatgaaaagaaagttgccctcctctatctagacaatgaggaggaggagaatgatgggcattggttttaataagcagaaacattttgttttaatggcagcctgttggcgacgtgccaacatccaaaggccttaacttattttaagaggccgagggagtctatgaaaatctccccttttttacttttttaaagagtactcccggcatggtcaatttcctttatagttaatccgtaaaggtttccagttaattcatgccttaaaaggcactgcaattttatttttgagttgggacttttacaaaacacttttttccctggagtcttctctccacttctggagatgaatttctatgttttgcacctggtcacagacatggcttgcatctgtttgaaactacaattaattatagatgtcaaaacattaaccagattaaagtaatatatttaagagtaaattttgcttgcatgtgctaatatgaaataacagactaacattttaggggaaaaataaatacaatttagactctaaaaagtcttttcaaaaagaaatgggaaataggcagactgtttatgttaaaaaaattcttgctaaatgatttcatctttaggaaaaaattacttgccatatagagctaaattcatcttaagacttgaatgaattgctttctatgtacagaactttaaacaatatagtatttatggcgaggacagctgtagtctgttgtgatatttcacattctatttgcacaggttccctggcactggtagggtagatgattattgggaatcgcttacagtaccatttcattttttggcactaggtcattaagtagcacacagtctgaatgcccttttctggagtggccagttcctatcagactgtgcagacttgcgcttctctgcaccttatcccttagcacccaaacatttaatttcactggtgggaggtagaccttgaagacaatgaagagaatgccgatactcagactgcagctggaccggcaagctggctgtgtacaggaaaattggaagcacacagtggactgtgcctcttaaagatgcctttcccaaccctccattcatgggatgcaggtctttctgagctcaagggtgaaagatgaatacaataacaaccatgaacccacctcacggaagctttttttgcactttgaacagaagtcattgcagttggggtgttttgtccagggaaacagtttattaaatagaaggatgttttggggaaggaactggatatctctcctgcagcccagcaccgagatacccaggacgggcctggggggcgagaaaggcccccatgctcatgggccgcggagtgtggacctgtagataggcaccaccgagtttaagatactgggatgagcatgcttcattggattcattttattttacacgtcagtattgttttaaagtttctgtctgtaaagtgtagcatcatatataaaaagagtttcgctagcagcgcattttttttagttcaggctagcttctttcacataatgctgtctcagctgtatttccagtaacacagcatcatcgcactgactgtggcgcactggggaataacagtctgagctagcaccaccctcagccaggctacaacgacagcactggagggtcttccctctcagattcacctggaggccctcagacccccagggtgcacgtctccccaggtcctgggagtggctaccgcaggtagtttctggagagcacgttttcttcattgataagtggaggagaaatgcagcacagctttcaagatactattttaaaaacaccatgaatcagatagggaaagaaagttgattggaatagcaagtttaaacctttgttgtccatctgccaaatgaactagtgattgtcagactggtatggaggtgactgctttgtaaggttttgtcgtttctaatacagacagagatgtgctgattttgttttagctgtaacaggtaatggtttttggatagatgattgactggtgagaatttggtcaaggtgacagcctcctgtctgatgacaggacagactggtggtgaggagtctaagtgggctcagtttgatgtcagtgtctgggctcatgacttgtaaatggaagctgatgtgaacaggtaattaatattatgacccacttctatttactttgggaaatatcttggatcttaattatcatctgcaagtttcaagaagtattctgccaaaagtatttacaagtatggactcatgagctattgttggttgctaaatgtgaatcacgcgggagtgagtgtgcccttcacactgtgacattgtgacattgtgacaagctccatgtcctttaaaatcagtcactctgcacacaagagaaatcaacttcgtggttggatggggccggaacacaaccagtctttttgtatttattgttactgagacaaaacagtactcactgagtgtttttcagtttcctactggtggttttgatattgtttgtttaagatgtatatttagaatgacatcatctaagaagctgattttgctaaactcctgttccctacaatgggaaatgtcacaagaatgtgcaaaaataaaaatctgaggaaaaaacccaca

SEQ ID NO: 48 - DNA, 3304 bp, Homo sapiens
actccatctgagggtggctgcgtgtccacatacgaggggacagggctgaggatgaggagaaccctggggacccagaagaccgtgccttgcctggaagtcctgcctgtaggcctgaaggacttgccctaacagagcctcaacaactacctggtgattcctacttcagccccttggtgtgagcagcttctcaacatgaactacagcctccacttggccttcgtgtgtctgagtctcttcactgagaggatgtgcatccaggggagtcagttcaacgtcgaggtcggcagaagtgacaagctttccctgcctggctttgagaacctcacagcaggatataacaaatttctcaggcccaattttggtggagaacccgtacagatagcgctgactctggacattgcaagtatctctagcatttcagagagtaacatggactacacagccaccatatacctccgacagcgctggatggaccagcggctggtgtttgaaggcaacaagagcttcactctggatgcccgcctcgtggagttcctctgggtgccagatacttacattgtggagtccaagaagtccttcctccatgaagtcactgtgggaaacaggctcatccgcctcttctccaatggcacggtcctgtatgccctcagaatcacgacaactgttgcatgtaacatggatctgtctaaataccccatggacacacagacatgcaagttgcagctggaaagctggggctatgatggaaatgatgtggagttcacctggctgagagggaacgactctgtgcgtggactggaacacctgcggcttgctcagtacaccatagagcggtatttcaccttagtcaccagatcgcagcaggagacaggaaattacactagattggtcttacagtttgagcttcggaggaatgttctgtatttcattttggaaacctacgttccttccactttcctggtggtgttgtcctgggtttcattttggatctctctcgattcagtccctgcaagaacctgcattggagtgacgaccgtgttatcaatgaccacactgatgatcgggtcccgcacttctcttcccaacaccaactgcttcatcaaggccatcgatgtgtacctggggatctgctttagctttgtgtttggggccttgctagaatatgcagttgctcactacagttccttacagcagatggcagccaaagatagggggacaacaaaggaagtagaagaagtcagtattactaatatcatcaacagctccatctccagctttaaacggaagatcagctttgccagcattgaaatttccagcgacaacgttgactacagtgacttgacaatgaaaaccagcgacaagttcaagtttgtcttccgagaaaagatgggcaggattgttgattatttcacaattcaaaaccccagtaatgttgatcactattccaaactactgtttcctttgatttttatgctagccaatgtattttactgggcatactacatgtatttttgagtcaatgttaaatttcttgcatgccataggtcttcaacaggacaagataatgatgtaaatggtattttaggccaagtgtgcacccacatccaatggtgctacaagtgactgaaataatatttgagtctttctgctcaaagaatgaagctccaaccattgttctaagctgtgtagaagtcctagcattataggatcttgtaatagaaacatcagtccattcctctttcatcttaatcaaggacattcccatggagcccaagattacaaatgtactcagggctgtttattcggtggctccctggtttgcatttacctcatataaagaatgggaaggagaccattgggtaaccctcaagtgtcagaagttgtttctaaagtaactatacatgttttttactaaatctctgcagtgcttataaaatacattgttgcctatttagggagtaacattttctagtttttgtttctggttaaaatgaaatatgggcttatgtcaattcattggaagtcaatgcactaactcaataccaagatgagtttttaaataatgaatattatttaataccacaacagaattatccccaatttccaataagtcctatcattgaaaattcaaatataagtgaagaaaaaattagtagatcaacaatctaaacaaatccctcggttctaagatacaatggattccccatactggaaggactctgaggctttattcccccactatgcatatcttatcattttattattatacacacatccatcctaaactatactaaagcccttttcccatgcatggatggaaatggaagatttttttttaacttgttctagaagtcttaatatgggctgttgccatgaaggcttgcagaattgagtccattttctagctgcctttattcacatagtgatggggtactaaaagtactgggttgactcagagagtcgctgtcattctgtcattgctgctactctaacactgagcaacactctcccagtggcagatcccctgtatcattccaagaggagcattcatccctttgctctaatgatcaggaatgatgcttattagaaaacaaactgcttgacccaggaacaagtggcttagcttaagtaaacttggctttgctcagatccctgatccttccagctggtctgctatgagtggcttatcccgcatgagcaggagcgtgctggccctgagtactgaactttctgagtaacaatgagatacgttacagaacctatgttcaggttgcgggtgagctgccctctccaaatccagccagagatgcacattcctcggccagtctcagccaacagtaccaaaagtgatttttgagtgtgccagggtaaaggcttccagttcagcctcagttattttagacaatctcgccatctttaatttcttagcttcctgttctaataaatgcacggctttacctttcctgtcagaaataaaccaaggctctaaaagatgatttcccttctgtaactccctagagccacaggttctcattccttttcccattatacttctcacaattcagtttctatgagtttgatcacctgatttttttaacaaaatatttctaacgggaatgggtgggagtgctggtgaaaagaggtgaaatgtggttgtatgagccaatcatatttgtgattttttaaaaaaagtttaaaaggaaatatctgttctgaaaccccacttaagcattgtttttatataaaaacaatgataaagatgtgaaactgtgaaataaatataccatattagctacccaccaaa

SEQ ID NO: 49 - DNA, 2324 bp, Homo sapiens
gtaggtgtcacttatatcacaaggctacaggtgtctttatttccactgcacgctggtgctgggagcgcctgccttctcttgccttgaaagcctcctctttggacctagccaccgctgccctcacggtaatgttggactcggtgacacacagcaccttcctgcctaatgcatccttctgcgatcccctgatgtcgtggactgatctgttcagcaatgaagagtactaccctgcctttgagcatcagacagcctgtgactcatactggacatcagtccaccctgaatactggactaagcgccatgtgtgggagtggctccagttctgctgcgaccagtacaagttggacaccaattgcatctccttctgcaacttcaacatcagtggcctgcagctgtgcagcatgacacaggaggagttcgtcgaggcagctggcctctgcggcgagtacctgtacttcatcctccagaacatccgcacacaaggttactccttttttaatgacgctgaagaaagcaaggccaccatcaaagactatgctgattccaactgcttgaaaacaagtggcatcaaaagtcaagactgtcacagtcatagtagaacaagcctccaaagttctcatctatgggaatttgtacgagacctgcttctatctcctgaagaaaactgtggcattctggaatgggaagatagggaacaaggaatttttcgggtggttaaatcggaagccctggcaaagatgtggggacaaaggaagaaaaatgacagaatgacatatgaaaagttgagcagagccctgagatactactataaaacaggaattttggagcgggttgaccgaaggttagtgtacaaatttggaaaaaatgcacacgggtggcaggaagacaagctatgatctgctccaggcatcaagctcattttatggatttctgtcttttaaaacaatcagattgcaatagacattcgaaaggcttcattttcttctctttttttttaacctgcaaacatgctgataaaatttctccacatctcagcttacatttggattcagagttgttgtctacggagggtgagagcagaaactcttaagaaatcctttcttctccctaaggggatgaggggatgatcttttgtggtgtcttgatcaaactttattttcctagagttgtggaatgacaacagcccatgccattgatgctgatcagagaaaaactattcaattctgccattagagacacatccaatgctcccatcccaaaggttcaaaagttttcaaataactgtggcagctcaccaaaggtgggggaaagcatgattagtttgcaggttatggtaggagagggtgagatataagacatacatactttagattttaaattattaaagtcaaaaatccatagaaaagtatccctttttttttttttgagacgggttctcactatgttgcccagggctggtcttgaactcctatgctcaagtgatcctcccacctcggcctcccaaagtactgtgattacaagcgtgagccacggcacctgggcagaaaagtatcttaattaatgaaagagctaagccatcaagctgggacttaattggatttaacataggttcacagaaagtttcctaaccagagcatctttttgaccactcagcaaaacttccacagacatccttctggacttaaacacttaacattaaccacattattaattgttgctgagtttattcccccttctaactgatggctggcatctgatatgcagagttagtcaacagacactggcatcaattacaaaatcactgctgtttctgtgattcaagctgtcaacacaataaaatcgaaattcattgattccatctctggtccagatgttaaacgtttataaaaccggaaatgtcctaacaactctgtaatggcaaattaaattgtgtgtcttttttgttttgtctttctacctgatgtgtattcaagcgctataacacgtatttccttgacaaaaatagtgacagtgaattcacactaataaatgttcataggttaaagtctgcactgacattttctcatcaatcactggtatgtaagttatcagtgactgacagctaggtggactgcccctaggacttctgtttcaccagagcaggaatcaagtggtgaggcactgaatcgctgtacaggctgaagacctccttattagagttgaacttcaaagtaacttgttttaaaaaatgtgaattactgtaaaataatctattttggattcatgtgttttccaggtggatatagtttgtaaacaatgtgaataaagtatttaacatgtaaaaa

SEQ ID NO: 50 - DNA, 1119 bp, Homo sapiens
accaaatcaaccataggtccaagaacaattgtctctggacggcagctatgcgactcaccgtgctgtgtgctgtgtgcctgctgcctggcagcctggccctgccgctgcctcaggaggcgggaggcatgagtgagctacagtgggaacaggctcaggactatctcaagagattttatctctatgactcagaaacaaaaaatgccaacagtttagaagccaaactcaaggagatgcaaaaattctttggcctacctataactggaatgttaaactcccgcgtcatagaaataatgcagaagcccagatgtggagtgccagatgttgcagaatactcactatttccaaatagcccaaaatggacttccaaagtggtcacctacaggatcgtatcatatactcgagacttaccgcatattacagtggatcgattagtgtcaaaggctttaaacatgtggggcaaagagatccccctgcatttcaggaaagttgtatggggaactgctgacatcatgattggctttgcgcgaggagctcatggggactcctacccatttgatgggccaggaaacacgctggctcatgcctttgcgcctgggacaggtctcggaggagatgctcacttcgatgaggatgaacgctggacggatggtagcagtctagggattaacttcctgtatgctgcaactcatgaacttggccattctttgggtatgggacattcctctgatcctaatgcagtgatgtatccaacctatggaaatggagatccccaaaattttaaactttcccaggatgatattaaaggcattcagaaactatatggaaagagaagtaattcaagaaagaaatagaaacttcaggcagaacatccattcattcattcattggattgtatatcattgttgcacaatcagaattgataagcactgttcctccactccatttagcaattatgtcacccttttttattgcagttggtttttgaatgtctttcactccttttaaggataaactcctttatggtgtgactgtgtcttattcatctatacttgcagtgggtagatgtcaataaatgttacatacacaaataaataaaatgtttattccatggtaaattta

SEQ ID NO: 51 - DNA, 4464 bp, Homo sapiens
gcgcactccagccctgcagcctccggagtcagtgccgcgcgcccgccgccccgcgccttcctgctcgccgcacctccgggagccggggcgcacccagcccgcagcgccgcctccccgcccgcgccgcctccgaccgcaggccgagggccgccactggccggggggaccgggcagcagcttgcggccgcggagccgggcaacgctggggactgcgccttttgtccccggaggtccctggaagtttgcggcaggacgcgcgcggggaggcggcggaggcagccccgacgtcgcggagaacagggcgcagagccggcatgggcatcgggcgcagcgaggggggccgccgcggggcagccctgggcgtgctgctggcgctgggcgcggcgcttctggccgtgggctcggccagcgagtacgactacgtgagcttccagtcggacatcggcccgtaccagagcgggcgcttctacaccaagccacctcagtgcgtggacatccccgcggacctgcggctgtgccacaacgtgggctacaagaagatggtgctgcccaacctgctggagcacgagaccatggcggaggtgaagcagcaggccagcagctgggtgcccctgctcaacaagaactgccacgccggcacccaggtcttcctctgctcgctcttcgcgcccgtctgcctggaccggcccatctacccgtgtcgctggctctgcgaggccgtgcgcgactcgtgcgagccggtcatgcagttcttcggcttctactggcccgagatgcttaagtgtgacaagttccccgagggggacgtctgcatcgccatgacgccgcccaatgccaccgaagcctccaagccccaaggcacaacggtgtgtcctccctgtgacaacgagttgaaatctgaggccatcattgaacatctctgtgccagcgagtttgcactgaggatgaaaataaaagaagtgaaaaaagaaaatggcgacaagaagattgtccccaagaagaagaagcccctgaagttggggcccatcaagaagaaggacctgaagaagcttgtgctgtacctgaagaatggggctgactgtccctgccaccagctggacaacctcagccaccacttcctcatcatgggccgcaaggtgaagagccagtacttgctgacggccatccacaagtgggacaagaaaaacaaggagttcaaaaacttcatgaagaaaatgaaaaaccatgagtgccccacctttcagtccgtgtttaagtgattctcccgggggcagggtggggagggagcctcgggtggggtgggagcgggggggacagtgccccgggaacccggtgggtcacacacacgcactgcgcctgtcagtagtggacattgtaatccagtcggcttgttcttgcagcattcccgctcccttccctccatagccacgctccaaaccccagggtagccatggccgggtaaagcaagggccatttagattaggaaggtttttaagatccgcaatgtggagcagcagccactgcacaggaggaggtgacaaaccatttccaacagcaacacagccactaaaacacaaaaagggggattgggcggaaagtgagagccagcagcaaaaactacattttgcaacttgttggtgtggatctattggctgatctatgcctttcaactagaaaattctaatgattggcaagtcacgttgttttcaggtccagagtagtttctttctgtctgctttaaatggaaacagactcataccacacttacaattaaggtcaagcccagaaagtgataagtgcagggaggaaaagtgcaagtccattatgtaatagtgacagcaaagggaccaggggagaggcattgccttctctgcccacagtctttccgtgtgattgtctttgaatctgaatcagccagtctcagatgccccaaagtttcggttcctatgagcccggggcatgatctgatccccaagacatgtggaggggcagcctgtgcctgcctttgtgtcagaaaaaggaaaccacagtgagcctgagagagacggcgattttcgggctgagaaggcagtagttttcaaaacacatagttaaaaaagaaacaaatgaaaaaaattttagaacagtccagcaaattgctagtcagggtgaattgtgaaattgggtgaagagcttaggattctaatctcatgttttttccttttcacatttttaaaagaacaatgacaaacacccacttatttttcaaggttttaaaacagtctacattgagcatttgaaaggtgtgctagaacaaggtctcctgatccgtccgaggctgcttcccagaggagcagctctccccaggcatttgccaagggaggcggatttccctggtagtgtagctgtgtggctttccttcctgaagagtccgtggttgccctagaacctaacaccccctagcaaaactcacagagctttccgtttttttctttcctgtaaagaaacatttcctttgaacttgattgcctatggatcaaagaaattcagaacagcctgcctgtccccccgcactttttacatatatttgtttcatttctgcagatggaaagttgacatgggtggggtgtccccatccagcgagagagtttcaaaagcaaaacatctctgcagtttttcccaagtaccctgagatacttcccaaagcccttatgtttaatcagcgatgtatataagccagttcacttagacaactttacccttcttgtccaatgtacaggaagtagttctaaaaaaaatgcatattaatttcttcccccaaagccggattcttaattctctgcaacactttgaggacatttatgattgtccctctgggccaatgcttatacccagtgaggatgctgcagtgaggctgtaaagtggccccctgcggccctagcctgacccggaggaaaggatggtagattctgttaactcttgaagactccagtatgaaaatcagcatgcccgcctagttacctaccggagagttatcctgataaattaacctctcacagttagtgatcctgtccttttaacaccttttttgtggggttctctctgacctttcatcgtaaagtgctggggaccttaagtgatttgcctgtaattttggatgattaaaaaatgtgtatatatattagctaattagaaatattctacttctctgttgtcaaactgaaattcagagcaagttcctgagtgcgtggatctgggtcttagttctggttgattcactcaagagttcagtgctcatacgtatctgctcattttgacaaagtgcctcatgcaaccgggccctctctctgcggcagagtccttagtggaggggtttacctggaacattagtagttaccacagaatacggaagagcaggtgactgtgctgtgcagctctctaaatgggaattctcaggtaggaagcaacagcttcagaaagagctcaaaataaattggaaatgtgaatcgcagctgtgggttttaccaccgtctgtctcagagtcccaggaccttgagtgtcattagttactttattgaaggttttagacccatagcagctttgtctctgtcacatcagcaatttcagaaccaaaagggaggctctctgtaggcacagagctgcactatcacgagcctttgtttttctccacaaagtatctaacaaaaccaatgtgcagactgattggcctggtcattggtctccgagagaggaggtttgcctgtgatttcctaattatcgctagggccaaggtgggatttgtaaagctttacaataatcattctggatagagtcctgggaggtccttggcagaactcagttaaatctttgaagaatatttgtagttatcttagaagatagcatgggaggtgaggattccaaaaacattttatttttaaaatatcctgtgtaacacttggctcttggtacctgtgggttagcatcaagttctccccagggtagaattcaatcagagctccagtttgcatttggatgtgtaaattacagtaatcccatttcccaaacctaaaatctgtttttctcatcagactctgagtaactggttgctgtgtcataacttcatagatgcaggaggctcaggtgatctgtttgaggagagcaccctaggcagcctgcagggaataacatactggccgttctgacctgttgccagcagatacacaggacatggatgaaattcccgtttcctctagtttcttcctgtagtactcctcttttagatcctaagtctcttacaaaagctttgaatactgtgaaaatgttttacattccatttcatttgtgttgtttttttaactgcattttaccagatgttttgatgttatcgcttatgttaatagtaattcccgtacgtgttcattttattttcatgctttttcagccatgtatcaatattcacttgactaaaatcactcaattaatcaa

SEQ ID NO: 52 - DNA, 488 bp, Homo sapiens
actctcttgctcacagtccacgatggcccggtccctggtgtgccttggtgtcatcatcttgctgtctgccttctccggacctggtgtcaggggtggtcctatgcccaagctggctgaccggaagctgtgtgcggaccaggagtgcagccaccctatctccatggctgtggcccttcaggactacatggcccccgactgccgattcctgaccattcaccggggccaagtggtgtatgtcttctccaagctgaagggccgtgggcggctcttctggggaggcagcgttcagggagattactatggagatctggctgctcgcctgggctatttccccagtagcattgtccgagaggaccagaccctgaaacctggcaaagtcgatgtgaagacagacaaatgggatttctactgccagtgagctcagcctaccgctggccctgccgtttcccctccttggctttatgcaaatacaatcagcccagtgcaaa

SEQ ID NO: 53 - DNA, 573 bp, Homo sapiens
ctccattccattatacctttgagtatataaaacagctacaatattccagggccagtcacttgccatttctcataacagcgtcagagagaaagaactgactgaaacgtttgagatgaagaaagttctcctcctgatcacagccatcttggcagtggctgttggtttcccagtctctcaagaccaggaacgagaaaaaagaagtatcagtgacagcgatgaattagcttcagggttttttgtgttcccttacccatatccatttcgcccacttccaccaattccatttccaagatttccatggtttagacgtaattttcctattccaatacctgaatctgcccctacaactccccttcctagcgaaaagtaaacaagaaggaaaagtcacgataaacctggtcacctgaaattgaaattgagccacttccttgaagaatcaaaattcctgttaataaaagaaaaacaaatgtaattgaaatagcacacagcattctctagtcaatatctttagtgatcttctttaataaacttgaaagcaaagattttggtttcttaatttccacaaaaaaaaaa

SEQ ID NO: 54 - DNA, 4195 bp, Homo sapiens
tcggcggtagcggcgccgcttggagcacgggcgctgcgggacggagcccggagccggaggcggcggcggcggagacgtcggccggagctcgagtccagtccagcccccggctccgccacctgcagagcagaagccactctcttgggaccattcataagcaggagacatcaacaccgtgacacatgccagtgccaccgccacccccacctcctctgcctccacctcccccgcctctgggggctcctccccctcccccaccatcagcacccccggtaagcacagacacctccagcttgcgaagggcagatccgaaaggccggagtgcgctgttggctgatatccagcaaggaactcgcctgcgcaaagtcacgcagatcaacgaccgcagtgccccgcagatcgagagttctaaaggaaccaacaaagaaggaggaggttctgcaaacacacgaggcgcgagcacacctcccaccctgggagatctgtttgctggtggctttcctgtattgcgaccagcaggccagcgggatgtagcaggtggcaagacagggcagggccctggctcccgcgcgccctctcccaggcttcccaacaaaaccatcagcggcccgcttatcccgcctgcctctcccaggctaggcaatacctccgaggcgcatggcgctgccaggacagccccgcctcgccccaacgtgcctgccccgccccctcccaccccaccccctccgcctccacccttacccccgccccttccctcttcctcccccatcaaaactccgcttgtgtccccacccggcccactgaccaaagggaacctcccggtggttgcaccccccgtcccctgtgcgccaccacctccacctccgccacctcccccaacgccacccccgctgcccccggcctcggttcttagtgacaaggcagtgaagcctcagctggctcccttgcacctcccgcccatcccgcccccgctccctctgctcccaccttgtgggtatccggggctcaaagcggagcccgccagccctgcgcaagatgcgcaggagcctcccgccccgccgcccccgctccccccttatgcttcttgctccccgagggcttctttgcccgcgccccctttgccaggagttaatagcagcagtgaaactccacccccgctaccccctaaatcccccagcttccaggccccaccgcagaaggccggtgcgcaggccttgcccgccccgcctgcccctccgggctcccagccgttcctgcagaagaagaggcatggccgaccaggggccggtgggggaaagctaaatccacctccagcaccccctgcgagatcacctaccacagagctttcaagcaagagccagcaggccacagcctggaccccgacgcagcagcctggaggtcaactgcgaaatggaagcctgcacatcattgatgacttcgagtctaaattcacgttccattctgtggaagactttccccctccggatgaatataaaccatgccagaagatttaccccagcaagatccccagaagccgtacacctggtccctggctccaagcggaagcagtcgggcagagctctgatgacatcaaaggcagaaattctcagttatctctaaagactcttcggtgagaagacagatgaagcgaaggtcctggggttccaggttgcagaacaacatgtcagaccccacccaccccatgctcaagctgtaattcagttggcatacaggcttggaattgagaatttatttattgtaaatatgtgatttgcacgggctttaaagcagtattttaattgacttttatttcggtaatattttttaaaacacccctcatttttccattttttgcattgcatcttggcatttgtcagcacagatagagccctgtccctccacctagtgcccactccatgactgtgaatctgcttgcaggctggcccttcctagattctgaaccgtttgtagagagtccttagtttgcaggtagccccaaagttataaatatccacaacggcttcttattggcataatttcatattctcatcacactaactgcaaaatcaaaccaaataatgccttatcaatgatgcagctcagaggaagtagcgtgtcccccacacccagacagtgccgcgcagcctccagggaacgaggtgccatgtctcgcttccattttgcagtacagggaatttttttttttttttttttttttttttttgctgcctaatgtaatacatcacaaagtaaaggcaagagtgggcttggccctccgatgccaaccacagggccccttttgtaactgaataatcctccaagtagccagtgctcctactgtttacagtgtccctcgtgcccaagtctctgtcactttcatcctgttccctccaagttcccagtcccatcccagtagccagctttatgagattttggtatttcttccctacagattaaaaacatacacaactcatcattatgctaaactaccagttgtatctcagaggtctccccttctgcccttgcttcgagtgtggacttccatggaaaatatgacatgaaaaagtgtagaacgaaacatcgtgtgaaatacctgccacaaatacctagtgcctcactgcccccatcttaggatccttggagccacccgtcaggcaaaacctagctcccttctgagctaaaggagaaccttgcctgacaactccacattcattcccttgtggtgggcacctgtctgtggggagatgtgtgcaagctcagccactctgaatatggaaaaggtcaggccgggctggtcctgctcttcactccctcttcttgatcctgtagggagtggaaatgtgtttttgcttgctgcctgacccctgatgttccccatctttggtcggggaagactgtgacagaggaaggagaaaaaatagaaggaaacagactgatccctgggctgtgctcaaaatagctgccctttaaaggaaatcaggcagggaggggagggaaaccagcgaaaaagaaatttgctttgcaacaacccacgcacacattcacccctgaagtatatcatgaacagaccaagccatccagaaaggcagccggtcaggagggtgtgggcaaacatgactgcatctgcctcactgttgtctggagtaacgactcaggtggtgtcctgcagcagtgctgtgctttctcattccagatggaagcaagtgagccagggtcaaattcccttctccaggggaatgaatcaagcccaaactgtaacagctaaataagtagaagtttttgcaggtcatcagctctgggcataactaatttgttttattggttctggaagatttccaaaaagccagaatttattattataacagtgtccactccactgccctcacagttgtgtaaaataattatagaagttttaatgatcctgattaagaagaccctagacaaaggcaattccaccttcagagtagactgcctgccctaatgaggtgtttagacattcgtgtctcctatggctgggatggaaattaaaataacactatttaaggacagagcgggccaggagcagtggctcatgcaggtaatcccagcatgggaggctgaggtgggtggattacttgaggttaggagttcaagaccagcctggccaacatggtgaaaccctgtctactcaaatacaaaaaattagccaggcatggtggctcacacctgtaatcccagcaacttgggaggttcaggcacaagaattgcttgaaccctggaggtggaggttgcagtgagctgagatggcaccactgcactctagcctgggcaacagagcgagaccctaactcaaaaaaaaaaaaggacagaggggaggaaggagcagaaaccaaaaatggcaattagggagaaatctcaggaatgtggcatcccatctccccttgagacctatcactgaattcacaacccttcgagctcatgctggtgcactgagtcccttgggcgctgtaaaggtttaaccccttgactgtaaactcagacttagagacatctgagtcacacagtccccgccattgtcacatattctcactgacactgcagtctgtgactcctccaatgtttcacgtgtattttatatttattgatgtctccttccgcagattcatttctttgtacttaataaactttagtaagtggaaatgcttaaaaaaaaaaa

SEQ ID NO: 55 - DNA, 5447 bp, Homo sapiens
gggtggtgcagggcaggggtggtatatcctgtctgacggagggcgggcctcgccagtgccagagagggacgaaccagggtggaagcgccaggagcagctgcagggagccctcacgcggaccacgcactctatggccgtagggagccgctgagagcgagaagagcacgctcctgcccgcccgctgcaccgcacctcgcctcgcctctctgctctcctaggccccggccgcgcgccacccgcctcccgccaccatgaaccactcgccgctcaagaccgccttggcgtacgaatgcttccaggaccaggacaactccacgttggctttgccgtcggaccaaaagatgaaaacaggcacgtctggcaggcagcgcgtgcaggagcaggtgatgatgaccgtcaagcggcagaagtccaagtcttcccagtcgtccaccctgagccactccaatcgaggttccatgtatgatggcttggctgacaattacaactatgggaccaccagcaggagcagctactactccaagttccaggcagggaatggctcatggggatatccgatctacaatggaaccctcaagcgggagcctgacaacaggcgcttcagctcctacagccagatggagaactggagccggcactacccccggggcagctgtaacaccaccggcgcaggcagcgacatctgcttcatgcagaaaatcaaggcgagccgcagtgagcccgacctctactgtgacccacggggcaccctgcgcaagggcacgctgggcagcaagggccagaagaccacccagaaccgctacagcttttacagcacctgcagtggtcagaaggccataaagaagtgccctgtgcgcccgccctcttgtgcctccaagcaggaccctgtgtatatcccgcccatctcctgcaacaaggacctgtcctttggccactctagggccagctccaagatctgcagtgaggacatcgagtgcagtgggctgaccatccccaaggctgtgcagtacctgagctcccaggatgagaagtaccaggccattggggcctattacatccagcatacctgcttccaggatgaatctgccaagcaacaggtctatcagctgggaggcatctgcaagctggtggacctcctccgcagccccaaccagaacgtccagcaggccgcggcaggggccctgcgcaacctggtgttcaggagcaccaccaacaagctggagacccggaggcagaatgggatccgcgaggcagtcagcctcctgaggagaaccgggaacgccgagatccagaagcagctgactgggctgctctggaacctgtcttccactgacgagctgaaggaggaactcattgccgacgccctgcctgttctggccgaccgcgtcatcattcccttctctggctggtgcgatggcaatagcaacatgtcccgggaagtggtggaccctgaggtcttcttcaatgccacaggctgcttgagaaagagactgggcatgcgggagcttctggctcttgttccgcaaagggccactagtagcagggtgaacctgagctcggccgatgcaggccgccagaccatgcgtaactactcagggctcattgattccctcatggcctatgtccagaactgtgtagcggccagccgctgtgacgacaagtctgtggaaaactgcatgtgtgttctgcacaacctctcctaccgcctggacgccgaggtgcccacccgctaccgccagctggagtataacgcccgcaacgcctacaccgagaagtcctccactggctgcttcagcaacaagagcgacaagatgatgaacaacaactatgactgccccctgcctgaggaagagaccaaccccaagggcagcggctggttgtaccattcagatgccatccgcacctacctgaacctcatgggcaagagcaagaaagatgctaccctggaggcctgtgctggtgccctgcagaacctgacagccagcaaggggctgatgtccagtggcatgagccagttgattgggctgaaggaaaagggcctgccacaaattgcccgcctcctgcaatctggcaactctgatgtggtgcggtccggagcctccctcctgagcaacatgtcccgccaccctctgctgcacagagtgatggggaaccaggtgttcccggaggtgaccaggctcctcaccagccacactggcaataccagcaactccgaagacatcttgtcctcggcctgctacactgtgaggaacctgatggcctcgcagccacaactggccaagcagtacttctccagcagcatgctcaacaacatcatcaacctgtgccgaagcagtgcctcacccaaggccgcagaagctgcccggcttctcctgtctgacatgtggtccagcaaggaactgcagggtgtcctcagacagcaaggtttcgataggaacatgctgggaaccttagctggggccaacagcctcaggaacttcacctcccgattctaagaagagactgtccaagcaagttaggcttgcaggaagatatgacccagctgagaagccctcaggcctcgctggatggggttttctgtccatcctgtgcagtatttgggaaagttcacaagaaactgagaagaaacctaaaaactgtggatagtggaaagatttttagattttttttttccttggggaaactggcaggcaatgggggttagggaggttggggcggggggggctttcttgagttaaaggggcttatatgtgatgtcaatatttcttcctctgagaaatggtatatatatgtgtataatgtaagtgtgtgcatgcatgtgcgcgtgcatgtgtgtgtgtgtgagtgtcttaaagcataaccacaaactgcaaaaagctaggtaagctattttgttgcagctcataaggtggtgaaaaggactctcctgtgtttcttactcataggcaaggacaacatgtgctttttggtgagctgctcataattcctgaaatgtgtggtgccagggcaagggggccatcactgcagtcaggccctcagaggagtcctgcaggcttcctaccagtggtctccaggggtgcaggagtaactggggctgggccagcctccccacttacaaggctgctttccaggaagggaggtctggtgtatctcatgggagaatctggggtgtctgtaatgtcacccctccagcagcgccacaaggactgaggttgggtaggtgtggggttccagaggacagcaggacactctcgcatactttgccaaatgaggcctgctcagaggagtaggagctgaaagatggtgccttccaccctcttgggctgtgtgcccatcagagcaggctcagcctgcaaaggccctgcattcagaggtcttgtaatctacttgttgcaggagaaagaaggtaaaaaatgatttttttaagaaaagctattttattgcagctctttcccaagagctgttctgggaatggctggtcttcatattcccagtggagaggggaacaagtggggctgggcatatacctattccggcttctagtgggatggagttggggtatagaaattaaccaggaagatgtttccaccaagcctgctgtgagtcaattgagggagtgtttggggtcccaggagacttggacggggggagtttgggtagactaggaaaggaaagtgccatatcagggtaccggtaccggcaagctcacatctcagccaggggccatgccccacttcccctgaccccagctgtcttgtctccactctgtgaaacccacaggggatgtgataaacagggctattaggggtatcagccacgtcgagcccccagactctgtgcacttcagaccagcagcagcaggagggctcccgagggccttatgagaaaacctgtgtggacatcccttggtgtacactaagacagagcagagcccagcgctcccaagccttcctccttccagcttctacctccatgctagcattgctggtgttagagaggaattaacttcctggtctgtgcccttctctagaagaatataagatgctcctcctcctcaccccttctcagcctcctcccaagtcttcctcttctgcaccacccccgagtccaaacccacctcttgccccagcattcaggctggaaaacactgatgtggactcagtatgataactgagatgggggacgccagacatgtgaggacgctgtcctccgagaggtgtccccggctgttagccagctgtgctgtggtgctgtgggtctgtcataccctcccttgcttctgttcacactgggaggcccactcctggctcacctctccctctcagggacccacgtgggagcctggatccctggactgtcctgggcataggtttcaggggcctcctttgttgtcatcagaacccagaggaattcttctcctaaaaaatacgtatggcataccaatctgtgcggggcagtgtcctaagcacttagactacatcagggaagaacacagaccacatccctgtcctcatgcggcttatgttttctggaggaaagtggagacacaagtccttggctttagggctcccccggctgggggctgtgcagtccggtcagggcgggaggggaaatgcaccgctgcatgtgaaccttaccagcccaggcggatgccccttccccttagcactaccctggcctcctgcatcccctcgcctcatgttcctcccaccttcaaagaatgaagagccccatgggcccagcccctgccctgggaaccaggcagccttccagacctcaggggctgaggcagactattagggcagggctgactttggtgacactgcccattccctctcaggccagctcaggtcacccgggcctctgacccaggcctgtcactttgagaggggcaaaactgagaggggcttttcctagagaaagagaacaaggagcttgccaggcttcatgtagccgacacacgtctcaggattttaagtccacattggcctcacactaccagggccaatgcccaaaataaggagttccaatttggggccaaatgaggaaggacacagactctgccctgggatctcctgtgctagcggccaatgacaaatccagtcattggccaccagccacctctgcagtggggaccacactagcagccctgactccacactcctcctggggacccaagaggcagtgttgctgtctgcatgtccaccttggaatctggctgaactggctggcaggaccaagactgcggctggggtgggcagggaagggaagccgggggctgctgtgagggatcttggagcttccctgtagcccaccttccccttgcttcatgtttgtagaggaaccttgtgccggccaggcccagtttccttgtgtgatacactaatgtatttgctttttttggaaatagagaaaatcaataaattgctagtgtttctttgaacttt

SEQ ID NO: 56 - DNA, 1580 bp, Homo sapiens
attcctgtctcagctctcactgtcaacaacatcccatcctgaagacttgcttaccacaactgagagtggggagtcagtttgaggcctagcatcacttaaacttcctccaaaggcacaaaagccagaagagaaaaatgaagacgggacattttgaaatagtcaccatgctgctggcaaccatgattctagtggacattttccaggtgaaggctgaagtgttagacatggcagataatgcatttgatgatgaatacctgaaatgtacggacaggatggaaattaaatacgttccccaactgctaaaggaggaaaaagcaagccaccagcaattagatactgtgtgggaaaatgcaaaagccaaatgggcagcccgaaagactcaaatctttctccctatgaattttaaggataaccatggaatagccctgatggcatatatttccgaagctcaagagcaaactcccttttaccatctgttcagtgaagctgtgaagatggctggccaatctcgagaagattatatctatggcttccagttcaaagctttccacttttacctcacaagagccctgcagttgctgagaaaaccttgtgaggccagttccaaaactgtggtatatagaacaagccagggcacttcatttacatttggagggctaaaccaagccaggtttggccattttaccttggcatattcagccaaacctcaggctgctaatgaccagctcactgtgttatccatctacacatgccttggagttgacattgaaaattttcttgataaagaaagtgaaagaattactttaatacctctgaatgaggtttttcaagtgtcacaggagggggctggcaataaccttatccttcaaagcataaacaagacctgcagccattatgagtgtgcatttctaggtggactaaaaaccgaaaactgtattgagaacctagaatattttcaacccatctatgtctacaaccctggtgagaaaaaccagaagcttgaagaccatagtgagaaaaactggaagcttgaagaccatggtgagaaaaaccagaagcttgaagaccatggtgtgaaaatccttgaacccacccaaatacctgaagataaaagtcaaggaaatatcaacaatcctactccaggtccagttcctgttccaggtcccaaaagccatccttctgcatcctcgggcaaactgctgcttccacagtttgggatggtcatcattttaatcagtgtttctgctataaatctctttgttgctctgtagtttgatgcattgtttatctttcttattctttacttgaaataactatagggatccacaggagatcaaaaggaatgatgtattttttacgtgttggccaaagtcactggataaaatgagaattgtatatttgttattcattttgcaaattcagaaagttggtccagatatatgtcacagaacttttcacttgtatactactcttacaatggaaaaaaatcccgaaaactgtatacttctgattaaattcaataaaagattttgattagatatttcagaattgccaaaaaaaaaaaaaaaaaaaaaaaaaaa

SEQ ID NO: 57 - DNA, 2962 bp, Homo sapiens
agctcacagacccataatcctgcatttctctaacaagttgtttatggagttgcttctccatttgcctacatcccaaaattcacccctcccgggtttcttctgccccctcctgagtcccggcctgaaggagggggagggacgcgggtgcgggcgcgggtgggggagggcggacccgacgcacagggccagcgccgaggcgccccctctccgccagcggttgacgcccccggattatttatccgcaaagtcccgcgcgcgcccattgggccgaggcccgagtgtcagcgcgagtcccggctcgccattggctccgcacacgtgcggccctgactcacgtgcttccggtttgaaggcaaaaagtgtgcctgggtgattttttttttaagcgagagagtttgtgcaaagatccgagctgtcagagatttgaaaaaaaaaaaaaaaaaaaaaaaaaaaaaaacagcccggcgctggcggagacgcgctctccctgcaaaaaaagcaaaggcgattaaaggcgctgccagcctcacgctctgggcacagctgagcgtgacactcggggaagtcaaacccctcactactgcctaggaagatggctagactttaaatactatttttttccctttaagaaaaaaattattggagctttttttcttgctttctttttccttttctttttctttttttccttcatttttttggccgtggcttactccccatttaaatcaaatcattgaatctggttgcagaaagaaaaaagaaatagccaagtgtctccatatctggatgtctacaaattagagagggagagacagcgagatctatctgctagataagaacgagcgatccaggccagacgcctgagcttttttcctgcacccgccccgtgccttcgctgaggcttcgcctgcctccttcctccgcgcacccccacgggccgctggcaaagtggggtggggagcgaggcggtgggggcgggggccggcgcggcggccggggcggcggggcggccgagcatggaagaacagcagccggaacctaaaagtcagcgcgactcggccctcggcgcggcggcggcggcgactccgggcggcctcagcctgagcctcagtccgggcgccagcggcagcagcggcagcggcagcgatggagacagcgtgccggtgtccccgcagcctgcgcccccctcgccgcccgcggcgccttgcctgccgcccctggcccaccacccgcacctccccccacaccccccgcccccgccgcctcagcatctcgcggcgcctgctcaccagccgcagccagcggcccagctgcaccgcaccaccaactttttcatcgacaacatcctgaggccggacttcggctgcaaaaaggagcagccgccaccgcagcttctggtggctgcggcggccagaggaggcgcaggaggaggaggccgggtcgagcgtgacagaggccagactgccgcaggtagagaccctgtccacccgttgggcacccgggcgccaggcgctgcctcgctcctgtgcgccccggacgcgaactgtggcccacccgacggctcccagccagccgccgccggcgcgggcgcgtctaaagctgggaacccggctgcggcggcggcggcggccgcggcggcagtggcggcggcggcggcggccgcagcagccaagccctcggacaccggtggcggcggcagtggaggcggcgcggggagccccggagcgcagggcaccaaatacccggagcacggcaacccggctatcctacttatgggctcagccaacggcgggcccgtggtcaaaactgactcgcagcagcctctcgtatggcccgcctgggtgtactgcacacgttattcggatcgtccatcctccggtccgcgcaccaggaagctgaagaagaagaagaacgagaaggaggacaagcggccgcggaccgcgttcacggccgagcagctgcagagactcaaggcggagttccaggcaaaccgctacatcacggagcagcggcggcagaccctggcccaggaactcagcctcaacgagtcccagatcaagatctggttccagaacaagcgcgccaagatcaagaaagccacaggcatcaagaacggcctggcgctgcacctcatggcccagggactgtacaaccactccaccaccacggtccaggacaaagacgagagcgagtagccgccacaggccggggccgcgcccgcgccccctcccggcaccgccgccgtcgtctcccggcccctcgctgggggagaaagcatctgctccaaggagggagggagcgcagggaaaagagcgagagagacagaaagagagcctcagaatggacaatgacgttgaaacgcagcatttttgaaaagggagaaagactcggacaggtgctatcgaaaaataagatccattctctattcccagtataagggacgaaactgcgaactccttaaagctctatctagccaaaccgcttacgaccttgtatatatttaatttcaggtaaggaaaacacatacgtgtagcgatctctatttgctggacatttttattaatctcctttattattattgttataattattataattattataattattttatcccctcccccaccgcctcgctgcccccgcccagtttcgttttcgttgcctttttcatttgaatgtcattgcttctccggtgcctcccgacccgcatcgccggccctggtttctctgggacttttctttgtgtgcgagagtgtgtttcctttcgtgtctgcccacctcttctcccccacctcccgggtcccttctgtcggtctgtctgttctgcccccctttcgttttccggagacttgttgagaaatacgaccccacagactgcgagactgaaccgccgctacaagccaaagattttattatgttcagaaacctgtagtctgaaataaagtgtacactgtgctcacga

SEQ ID NO: 58 - DNA, 676 bp, Homo sapiens
acagcacgctgccacgccgacgcagacccctctctgcacgccagcccgcccgcacccaccatggccacagttcagcagctggaaggaagatggcgcctggtggacagcaaaggctttgatgaatacatgaaggagctaggagtgggaatagctttgcgaaaaatgggcgcaatggccaagccagattgtatcatcacttgtgatggtaaaaacctcaccataaaaactgagagcactttgaaaacaacacagttttcttgtaccctgggagagaagtttgaagaaaccacagctgatggcagaaaaactcagactgtctgcaactttacagatggtgcattggttcagcatcaggagtgggatgggaaggaaagcacaataacaagaaaattgaaagatgggaaattagtggtggagtgtgtcatgaacaatgtcacctgtactcggatctatgaaaaagtagaataaaaattccatcatcactttggacaggagttaattaagagaatgaccaagctcagttcaatgagcaaatctccatactgtttctttcttttttttttcattactgtgttcaattatctttatcataaacattttacatgcagctatttcaaagtgtgttggattaattaggatcatccctttggttaataaataaatgtgtttgtgctaa

SEQ ID NO: 59 - DNA, 3983 bp, Homo sapiens
gctcaaaagttcagaagttttcccaatgcttccttaagcggctggcgcgcgagagaccgagaaaaggtgacgcggggcccgggcaggcggccggcgcgcggccccccccccccccgccctggttatttggccgccttcgccggcagctcagggcagagtctcctggaaggcgcaggcagtgtggcgagaagggcgcctgcttgttctttctttttgtctgctttcccccgtttgcgcctggaagctgcgccgcgagttcctgcaaggcggtctgccgcggccgggcccggccttctcccctcgcagcgaccccgcctcgcggccgcgcgggccccgaggtagcccgaggcgccggaggagccagccccagcgagcgccgggagaggcggcagcgcagccggacgcacagcgcagcgggccggcaccagctcggccgggcccggactcggactcggcggccggcgcggcgcggcccggcccgagcgagggtggggggcggcgggcggcgcggggcggcggcgagcgggggccatgcaggcgcgctactccgtgtccagccccaactccctgggagtggtgccctacctcggcggcgagcagagctactaccgcgcggcggccgcggcggccgggggcggctacaccgccatgccggcccccatgagcgtgtactcgcaccctgcgcacgccgagcagtacccgggcggcatggcccgcgcctacgggccctacacgccgcagccgcagcccaaggacatggtgaagccgccctatagctacatcgcgctcatcaccatggccatccagaacgccccggacaagaagatcaccctgaacggcatctaccagttcatcatggaccgcttccccttctaccgggacaacaagcagggctggcagaacagcatccgccacaacctctcgctcaacgagtgcttcgtcaaggtgccgcgcgacgacaagaagccgggcaagggcagctactggacgctggacccggactcctacaacatgttcgagaacggcagcttcctgcggcggcggcggcgcttcaagaagaaggacgcggtgaaggacaaggaggagaaggacaggctgcacctcaaggagccgcccccgcccggccgccagcccccgcccgcgccgccggagcaggccgacggcaacgcgcccggtccgcagccgccgcccgtgcgcatccaggacatcaagaccgagaacggtacgtgcccctcgccgccccagcccctgtccccggccgccgccctgggcagcggcagcgccgccgcggtgcccaagatcgagagccccgacagcagcagcagcagcctgtccagcgggagcagccccccgggcagcctgccgtcggcgcggccgctcagcctggacggtgcggattccgcgccgccgccgcccgcgccctccgccccgccgccgcaccatagccagggcttcagcgtggacaacatcatgacgtcgctgcgggggtcgccgcagagcgcggccgcggagctcagctccggccttctggcctcggcggccgcgtcctcgcgcgcggggatcgcacccccgctggcgctcggcgcctactcgcccggccagagctccctctacagctccccctgcagccagacctccagcgcgggcagctcgggcggcggcggcggcggcgcgggggccgcggggggcgcgggcggcgccgggacctaccactgcaacctgcaagccatgagcctgtacgcggccggcgagcgcgggggccacttgcagggcgcgcccgggggcgcgggcggctcggccgtggacgaccccctgcccgactactctctgcctccggtcaccagcagcagctcgtcgtccctgagtcacggcggcggcggcggcggcggcgggggaggccaggaggccggccaccaccctgcggcccaccaaggccgcctcacctcgtggtacctgaaccaggcgggcggagacctgggccacttggcgagcgcggcggcggcggcggcggccgcaggctacccgggccagcagcagaacttccactcggtgcgggagatgttcgagtcacagaggatcggcttgaacaactctccagtgaacgggaatagtagctgtcaaatggccttcccttccagccagtctctgtaccgcacgtccggagctttcgtctacgactgtagcaagttttgacacaccctcaaagccgaactaaatcgaaccccaaagcaggaaaagctaaaggaacccatcaaggcaaaatcgaaactaaaaaaaaaaaatccaattaaaaaaaacccctgagaatattcaccacaccagcgaacagaatatccctccaaaaattcagctcaccagcaccagcacgaagaaaactctattttcttaaccgattaattcagagccacctccactttgccttgtctaaataaacaaacccgtaaactgttttatacagagacagcaaaatcttggtttattaaaggacagtgttactccagataacacgtaagtttcttcttgcttttcagagacctgctttcccctcctcccgtctcccctctcttgccttcttccttgcctctcacctgtaagatattattttatcctatgttgaagggagggggaaagtccccgtttatgaaagtcgctttctttttattcatggacttgttttaaaatgtaaattgcaacatagtaatttatttttaatttgtagttggatgtcgtggaccaaacgccagaaagtgttcccaaaacctgacgttaaattgcctgaaactttaaattgtgctttttttctcattataaaaagggaaactgtattaatcttattctatcctcttttctttctttttgttgaacatattcattgtttgtttattaataaattaccattcagtttgaatgagacctatatgtctggatactttaatagagctttaattattacgaaaaaagatttcagagataaaacactagaagttacctattctccacctaaatctctgaaaaatggagaaaccctctgactagtccatgtcaaattttactaaaagtctttttgtttagatttattttcctgcagcatcttctgcaaaatgtactatatagtcagcttgctttgaggctagtaaaaagatatttttctaaacagattggagttggcatataaacaaatacgttttctcactaatgacagtccatgattcggaaattttaagcccatgaatcagccgcggtcttaccacggtgatgcctgtgtgccgagagatgggactgtgcggccagatatgcacagataaatatttggcttgtgtattccatataaaattgcagtgcatattatacatccctgtgagccagatgctgaatagatattttcctattatttcagtcctttataaaaggaaaaataaaccagtttttaaatgtatgtatataattctcccccatttacaatccttcatgtattacatagaaggattgcttttttaaaaatatactgcgggttggaaagggatatttaatctttgagaaactattttagaaaatatgtttgtagaacaattatttttgaaaaagatttaaagcaataacaagaaggaaggcgagaggagcagaacattttggtctagggtggtttctttttaaaccattttttcttgttaatttacagttaaacctaggggacaatccggattggccctcccccttttgtaaataacccaggaaatgtaataaattcattatcttagggtgatctgccctgccaatcagactttggggagatggcgatttgattacagacgttcgggggggtggggggcttgcagtttgttttggagataatacagtttcctgctatctgccgctcctatctagaggcaacacttaagcagtaattgctgttgcttgttgtcaaaatttgatcattgttaaaggattgctgcaaataaatacactttaatttcagtcaaaaa

SEQ ID NO: 60 - DNA, 5579 bp, Homo sapiens
ataacagaccatctgtagactccttcggaaagcagcagagacgctgcagagggcttttcttagacatcaactgcagacggctggcaggatagaagcagcggctcacttggactttttcaccagggaaatcagagacaatgatggggctcttccccagaactacaggggctctggccatcttcgtggtggtcatattggttcatggagaattgcgaatagagactaaaggtcaatatgatgaagaagagatgactatgcaacaagctaaaagaaggcaaaaacgtgaatgggtgaaatttgccaaaccctgcagagaaggagaagataactcaaaaagaaacccaattgccaagattacttcagattaccaagcaacccagaaaatcacctaccgaatctctggagtgggaatcgatcagccgccttttggaatctttgttgttgacaaaaacactggagatattaacataacagctatagtcgaccgggaggaaactccaagcttcctgatcacatgtcgggctctaaatgcccaaggactagatgtagagaaaccacttatactaacggttaaaattttggatattaatgataatcctccagtattttcacaacaaattttcatgggtgaaattgaagaaaatagtgcctcaaactcactggtgatgatactaaatgccacagatgcagatgaaccaaaccacttgaattctaaaattgccttcaaaattgtctctcaggaaccagcaggcacacccatgttcctcctaagcagaaacactggggaagtccgtactttgaccaattctcttgaccgagagcaagctagcagctatcgtctggttgtgagtggtgcagacaaagatggagaaggactatcaactcaatgtgaatgtaatattaaagtgaaagatgtcaacgataacttcccaatgtttagagactctcagtattcagcacgtattgaagaaaatattttaagttctgaattacttcgatttcaagtaacagatttggatgaagagtacacagataattggcttgcagtatatttctttacctctgggaatgaaggaaattggtttgaaatacaaactgatcctagaactaatgaaggcatcctgaaagtggtgaaggctctagattatgaacaactacaaagcgtgaaacttagtattgctgtcaaaaacaaagctgaatttcaccaatcagttatctctcgataccgagttcagtcaaccccagtcacaattcaggtaataaatgtaagagaaggaattgcattccgtcctgcttccaagacatttactgtgcaaaaaggcataagtagcaaaaaattggtggattatatcctgggaacatatcaagccatcgatgaggacactaacaaagctgcctcaaatgtcaaatatgtcatgggacgtaacgatggtggatacctaatgattgattcaaaaactgctgaaatcaaatttgtcaaaaatatgaaccgagattctactttcatagttaacaaaacaatcacagctgaggttctggccatagatgaatacacgggtaaaacttctacaggcacggtatatgttagagtacccgatttcaatgacaattgtccaacagctgtcctcgaaaaagatgcagtttgcagttcttcaccttccgtggttgtctccgctagaacactgaataatagatacactggcccctatacatttgcactggaagatcaacctgtaaagttgcctgccgtatggagtatcacaaccctcaatgctacctcggccctcctcagagcccaggaacagatacctcctggagtataccacatctccctggtacttacagacagtcagaacaatcggtgtgagatgccacgcagcttgacactggaagtctgtcagtgtgacaacaggggcatctgtggaacttcttacccaaccacaagccctgggaccaggtatggcaggccgcactcagggaggctggggcctgccgccatcggcctgctgctccttggtctcctgctgctgctgttggccccccttctgctgttgacctgtgactgtggggcaggttctactgggggagtgacaggtggttttatcccagttcctgatggctcagaaggaacaattcatcagtggggaattgaaggagcccatcctgaagacaaggaaatcacaaatatttgtgtgcctcctgtaacagccaatggagccgatttcatggaaagttctgaagtttgtacaaatacgtatgccagaggcacagcggtggaaggcacttcaggaatggaaatgaccactaagcttggagcagccactgaatctggaggtgctgcaggctttgcaacagggacagtgtcaggagctgcttcaggattcggagcagccactggagttggcatctgttcctcagggcagtctggaaccatgagaacaaggcattccactggaggaaccaataaggactacgctgatggggcgataagcatgaattttctggactcctacttttctcagaaagcatttgcctgtgcggaggaagacgatggccaggaagcaaatgactgcttgttgatctatgataatgaaggcgcagatgccactggttctcctgtgggctccgtgggttgttgcagttttattgctgatgacctggatgacagcttcttggactcacttggacccaaatttaaaaaacttgcagagataagccttggtgttgatggtgaaggcaaagaagttcagccaccctctaaagacagcggttatgggattgaatcctgtggccatcccatagaagtccagcagacaggatttgttaagtgccagactttgtcaggaagtcaaggagcttctgctttgtccacctctgggtctgtccagccagctgtttccatccctgaccctctgcagcatggtaactatttagtaacggagacttactcggcttctggttccctcgtgcaaccttccactgcaggctttgatccacttctcacacaaaatgtgatagtgacagaaagggtgatctgtcccatttccagtgttcctggcaacctagctggcccaacgcagctacgagggtcacatactatgctctgtacagaggatccttgctcccgtctaatatgaccagaatgagctggaataccacactgaccaaatctggatctttggactaaagtattcaaaatagcatagcaaagctcactgtattgggctaataatttggcacttattagcttctctcataaactgatcacgattataaattaaatgtttgggttcataccccaaaagcaatatgttgtcactcctaattctcaagtactattcaaattgtagtaaatcttaaagtttttcaaaaccctaaaatcatattcgccaggaaattttcctaaacattcttaagcttctatttttcccctgccaaaggaaggtgtttatcattttaaaatgcaatgtgatttagtggattaagcaggagcgctggttcttgtctccattgccttttcttatatcattgataatgatgtaagaatcacaaggggccgggcgcggtggctcacgcctgtaatcccagcactttgggaggccgaggcaggtggatcatgaggtcaggagatcgagaccatcctggctaacaaggtgaaaccccgtctctactaaaaatacaaaaaattagccgggcgcagtggcgggcgcctgtagtcccagctactcgggaggctgaggcaggagaatggcatgaacccgggaagcggagcttgcagtgagccgagattgcgccactgcagtccgcagtccggcctgggcgacagagcgagactccgtctcaaaaaaaaaaaaaaaaaaagaatcacaaggtatttgctaaagcattttgagctgcttggaaaaagggaagtagttgcagtagagtttcttccatcttcttggtgctgggaagccatatatgtgtcttttactcaagctaaggggtataagcttatgtgttgaatttgctacatctatatttcacatattctcacaataagagaattttgaaatagaaatatcatagaacatttaagaaagtttagtataaataatattttgtgtgttttaatccctttgaagggatctatccaaagaaaatattttacactgagctccttcctacacgtctcagtaacagatcctgtgttagtctttgaaaatagctcattttttaaatgtcagtgagtagatgtagcatacatatgatgtataatgacgtgtattatgttaacaatgtctgcagattttgtaggaatacaaaacatggccttttttataagcaaaacgggccaatgactagaataacacatagggcaatctgtgaatatgtattataagcagcattccagaaaagtagttggtgaaataattttcaagtcaaaaagggatatggaaagggaattatgagtaacctctattttttaagccttgcttttaaattaaacagctacagccatttaagccttgaggataataaagcttgagagtaataatgttaggttagcaaaggtttagatgtatcacttcatgcatgctaccatgatagtaatgcagctcttcgagtcatttctggtcattcaagatattcacccttttgcccatagaaagcaccctacctcacctgcttactgacattgtcttagctgatcacaagatcattatcagcctccattattccttactgtatataaaatacagagttttatattttcctttcttcgtttttcaccatattcaaaacctaaatttgtttttgcagatggaatgcaaagtaatcaagtgtttgtgctttcacctagaagggtgtggtcctgaaggaaagaggtcccctaaatatcccccaccctggtgctcctccctctccctggtaccctgactaccaggaagtcaggtgctagagcagctggagaagtgcaggcagcctgtgcttccacagatgggggtgctgctgcaacaaggctttcaatgtgcccatcttaggtgggagaagctagatcctgtgcagcagcctggtaagtcctgaggaggttccattgctcttcctgctgctgtcctttgcttctcaacggtggctcgctctacagtctagagcacatgcagctaacttgtgcctctgcttatgcatgagggttaaattaacaaccataaccttcatttgaagttcaaaggtgtattcaggatcctcaaagcattttaaccttgccgcttaaaacccaatttaccgtgaaatgggaattttgctgcattgttaaactgtagtggaaaccatgctatagtaataaaggttatataagagagaaattgaaattaaatgtgtttttaaatttcaaaaaaaaatcaatctttaggatgacttaaaaattgatttgccatgtaaaatgtatctgcattttttacacaaaacttgttttaagcataaaattttaaaactgtactacttgatgtattatacattttgaaccatatgtattaaaccataaacagtataatgttgttataataaaacaggcaataaatttataaataaaagctgaa

SEQ ID NO: 61 - DNA, 5989 bp, Homo sapiens
gcgtcccgggtccccgcgccgcgccgcgacctgcagaccccgccgccgcgctcgggcccgtctcccacgcccccgccgccccgcgcgcccaactccgccggccgccccgccccgccccgcgcgctccagacccccggggcggctgccgggagagatgctggaagaaacttcttaaatgaccgcgtctggctggccgtggagcctttctgggttggggagaggaaaggaaagtggaaaaaacctgagaacttcctgatctctctcgctgtgagacatgtctgagactcctgctcagtgtagcattaagcaggaacgaatttcatatacacctccagagagcccagtgccgagttacgcttcctcgacgccacttcatgttccagtgcctcgagcgctcaggatggaggaagactcgatccgcctgcctgcgcacctgcgcttgcagccaatttactggagcagggatgacgtagcccagtggctcaagtgggctgaaaatgagttttctttaaggccaattgacagcaacacgtttgaaatgaatggcaaagctctcctgctgctgaccaaagaggactttcgctatcgatctcctcattcaggtgatgtgctctatgaactccttcagcatattctgaagcagaggaaacctcggattcttttttcaccattcttccaccctggaaactctatacacacacagccggaggtcatactgcatcagaaccatgaagaagataactgtgtccagaggacccccaggccatccgtggataatgtgcaccataaccctcccaccattgaactgttgcaccgctccaggtcacctatcacgacaaatcaccggccttctcctgaccccgagcagcggcccctccggtcccccctggacaacatgatccgccgcctctccccggctgagagagctcagggacccaggccgcaccaggagaacaaccaccaggagtcctaccctctgtcagtgtctcccatggagaataatcactgcccagcgtcctccgagtcccacccgaagccatccagcccccggcaggagagcacacgcgtgatccagctgatgcccagccccatcatgcaccctctgatcctgaacccccggcactccgtggatttcaaacagtccaggctctccgaggacgggctgcatagggaagggaagcccatcaacctctctcatcgggaagacctggcttacatgaaccacatcatggtctctgtctccccgcctgaagagcacgccatgcccattgggagaatagcagactgtagactgctttgggattacgtctatcagttgctttctgacagccggtacgaaaacttcatccgatgggaggacaaagaatccaaaatattccggatagtggatcccaacggactggctcgactgtggggaaaccataagaacagaacaaacatgacctatgagaaaatgtccagagccctgcgccactactacaaactaaacattatcaggaaggagccaggacaaaggcttttgttcaggtttatgaaaaccccagatgaaatcatgagtggccgaacagaccgtctggagcacctagagtcccaggagctggatgaacaaatataccaagaagatgaatgctgaaggaaccaacagtccacctcagcgggccagcagcccagggaacccctgcccaccaggattgctggaagtgtgacggagcaggcgggctgaggagagtggaaaaggaagcgacccagaaatggcagggacacttctcttgcagaccaagagggaccctggagcaccttagacaaactacccagcacaggcggggctggaattctggcggagggcatgagcctgggactccatgtcacgtttccttctgatttggaatctctccatctgtaattcctcaccctcacccttccaccgttgttagtatcatggtgtttttgtttttgtttttgttttaagaacctgcagtttgactcttcatcgttcatctaggggaagacatctgatgttgttttcctatggaaatatatatctattatatatatattttttgcaaatctcacaaagtgcggcaagcccagctggtcaggaaagagaatacttgcagaggggttcaggttcctctttttcctgccacgtggatcaggtctgttcctgttactgttgggtcttggctgaaaaaaaaaaatgcttttaaaaaagataaaatgaaaaggagagctctctttttctctctcttgctctgttcttcccttggtcccctctgtcctcccgccctgcctgcagttgagattcagatgccttctgacagagttcagcctcttggagagtcttggggattgttggcacctaaacagaatcagtgacccgggtgctttgtggccagcagcacagaatcaaacccgcatcccagcattgggccacccatctgagggaggccaaaatcatcacagatgctgctgtgctgcagacagatacatgctagtccagagagccgcccctgagatggctgtgagaaccatgtgtctaaggcgtaagataaggatggaaggctgtccaagttatttggaaggcctcggcagcttgggattagcttgggagcgcagcgctgcaaagtggaaaatatgaaaagaccacacaggcccagcagtccagaaactgggcaaaaatattctgcagtggggatttatttttccaaagcaggtaacagaggctagtgagaaagaaaagctcctctctgctccattccaaaggccatcttgtggtcagtttcatgccctcacctgatttttttttttttttttttttttcaattcctaaccttttttaaagtttcctggtctccactggacacagagctttggagacggaggatcccagagggcagtctcagttgcaatcagtgtgtgcccagcctgggcagacaggaaattcctcggatacattattttttctttctttcatagctgtgtctcagaaaggacccatttgtggctctttttcacctcaaaataagatcgatggtatcttgtaaaatgagggtagtgccacttcttagtatttttgaaagctgttttagattttttttttttttccttttctagccatctaaattgactcttccaatataggtctcagaaatccaatatttggagtacaatttcttttaatccagattacacctgccttacaaagcaccccctccttgttcccctctgtttcctctactcagttgggggagaaactcacagctcctccgggatacatatgtgccctcagcagcagctcccaggtgaagttaccagacccctgggcttctccccagctttttctgagttgagtcagacatgtagagtttgggtcacacaggcaagaggaattttccctcggccttactgacaaggacaccaacctagggtgcaaacagatggactatggttcaaggacactggaattgaggagctgatcaaggctctcttcagccttgctctgtccctgcctcttatcagagcacaggtagacacacgggcatagccagcccactcctactgtcacaggcgccccaccattcaaccttccgggaggtcagggaccttctatatgaggcgagtgggtctcagtctgcttgaatggtgatgagattctgctggatctcagcacgctgcaggtgtcttttgagagcattcagtaggacatggtgatccctatttcagcctctaagatgactggtattctatctgaaatgcagagattaagccaaatacctgatgtattgtgaaagccactgattttaagaatggagagaaagggattttttactgcatccctctgtatgaatatgaaatcagagaccagggcatgatgttgctaggattagagcctctcagtctggcctcttcacccaagtgcaagaactcagtctcttactgttcaaagaatcttaacagttgaattatggagggaaattcccttttgccccaagcatttctatatttaaagcaatatcccaggagaatatgttagacttaggatgataccttcagccacttgaagaagaaatagaaggcgctcattccaatatagtctttatttcccattcagatacaggttgagcatccctaatctgaacagttaaaacccccaaatgccccaaaatccaaaccttcctgaacgctatgacaccatgagtggaaaattccacacctaacaaacacatttgctttcttatggttcaatgtacacaaactgttttatatagaaaatgatttcaaatatcataaaattaccttcaggctatgtgtataaagtatatatgagccataaatgaattttgtgtttagactttgtgtccatccccaagatctctcattttatatatatatatatatatatatatatatatatatatatatatatatacacacacacacacatacacaaatattccaggatacaaaaaaaaacatttaaaaatccgagacccagaacacttctggtcccaagcatttcagataagggatatcaatctgtactaccaataaggatttcgtaattcccctaactgcaaatgtcctcttcatttgttctttatgagaaaacccgggtagtgccagcacctggatacagtatttacaccctgcagaccctaaagatttcagattcagttagcaaaccttgatgaagcacctgctggacactgagggacccaaagctcaatcagccataatccctgctttcagagtttatattgtacctgcctaatccacccggcgtgactcatttcaacactaagtactaggggtgttgtcaggagacaaatctgaagtcaggagaggaaaatgcaaaggagccctgccgtgtgatggatgtgcattctcacttgggtcttgaagttctcattcctacatctcaagctagccaggcagtctcctctctatcagaagaaagcactggtaattggctagactggctatgttgaaggtaacatgaactctaagatcttgacccagggcgacttggttttgcttaaggtggcatcaccaatgttccaaatcctttagggagatgagggtatccccacagaaaaagaggaataatagaccaatggattttctcctttcaccagtatgtttggaaccctctgatccaatgtcttttgatactgatctcttgtccaaatgagaatgtcgctttagctgaaattcaaatggctgtgacaatttaccgaaatgatgaagtaaccaccattcccacctttcactgcctaggctccaagtctgaatacatttttgaaataggaactcccttttgcaaaaaagaaacctgggtgtcagggaggtgaagtgacttgccctaggagcagacagcatgccaagaatggaattaggctcaggatccagcctgggctcaccctgtgtggctcattcccacccaggaaactgaagataaaagatttgggaaaacacaccaagaaaaaggggcagttttctttgcccaagcatttggtgctagttagaggctgttcactctctcctgctcctcttcggagtagaaataaaggctgtgacacaaggaagccagtggggtgggagggaggcaccataatccctccctaaaacccacagaagactaacctgatactcttttgacccaactgcatcaacactaaacagctgcagaccccctgaatctttcacacatgccaagtgaacattcttgatgatttctctttgtgaccgcaaccacctgcaaaccagaacgactctagaatttccttccccgcccccctttttgtttagtttctaatctcttgtttatgaggtgtggggtttataagggactgaatcaaatgaatgtaacaaaaaagaaaaaaaaaacaaaaaaaaatgccttttctcagggccagtgagttgcaaataatttttaaagaaaagcctataattacatcatctcaataaattttttataaaaaaaaaaaaa

SEQ ID NO: 62 - DNA, 8974 bp, Homo sapiens
agagcgcgccagcaactcgggctctggactgcgggacgcctgagccgcgcactgaggcgaaaaggacaagggcacgcagcccccgccccgcgaagccgggctccggcacctcgcggaacctcccctcctgcgctcgcagccgcaggccccactccccgccagggagggagcggcgatgcctcgctctgtgcctgcgggtgtcggcgggtgcttctagggcgctcccagagccgcctccccctgttgctggcatcccgagcttcctcccttgccagccaggacgctgccgacttgtctttgcccgctgctccgcagacggggctgcaaagctgcaactaatggtgttggcctccctgcccacctgtggaagcaactgcgctgattgatgcgccacagacttttttcccctcgacctcgccggcgtcccctcccacagatccagcatcacccagtgaatgtacattagggtggtttcccccccagcttcgggctttgtttgggtttgattgtgtttggctcttcgctaagctgatttatgcagcagaagccccaccggctggagagaaacaaaagctcttttctttgtcccggagcaggctgcggagcccttgcagagccctctctccagtcgccgccggggcccttggccgtcgaaggaggtgcttctcgcggagaccgcgggacccgccgtgccgagccgggagggccgcaggggccctgagatgccgagcggtgcccgggcccgcttacctgcaccgcttgctccgagccgcggggtccgcctgctaggcctgcggaaaacgtcctagcgacactcggcccgcgggccccgaggtgcgcccgggaggcgcgagcccgcgtccggaaggcagtcaggcggcgggcgcggggcgggctgttttgcattatgtgcggctcggccctggctttttttaccgctgcatttgtctgcctgcaaaacgaccggcgaggtcccgcctcgttcctctgggcagcctgggtgttttcacttgttcttggactgggccaaggtgaagacaatagatgtgcatcttcaaatgcagcatcctgtgccaggtgccttgcgctgggtccagaatgtggatggtgtgttcaagaggatttcatttcaggtggatcaagaagtgaacgttgtgatattgtttccaatttaataagcaaaggctgctcagttgattcaatagaatacccatctgtgcatgttataatacccactgaaaatgaaattaatacccaggtgacaccaggagaagtgtctatccagctgcgtccaggagccgaagctaattttatgctgaaagttcatcctctgaagaaatatcctgtggatctttattatcttgttgatgtctcagcatcaatgcacaataatatagaaaaattaaattccgttggaaacgatttatctagaaaaatggcatttttctcccgtgactttcgtcttggatttggctcatacgttgataaaacagtttcaccatacattagcatccaccccgaaaggattcataatcaatgcagtgactacaatttagactgcatgcctccccatggatacatccatgtgctgtctttgacagagaacatcactgagtttgagaaagcagttcatagacagaagatctctggaaacatagatacaccagaaggaggttttgacgccatgcttcaggcagctgtctgtgaaagtcatatcggatggcgaaaagaggctaaaagattgctgctggtgatgacagatcagacgtctcatctcgctcttgatagcaaattggcaggcatagtggtgcccaatgacggaaactgtcatctgaaaaacaacgtctatgtcaaatcgacaaccatggaacacccctcactaggccaactttcagagaaattaatagacaacaacattaatgtcatctttgcagttcaaggaaaacaatttcattggtataaggatcttctacccctcttgccaggcaccattgctggtgaaatagaatcaaaggctgcaaacctcaataatttggtagtggaagcctatcagaagctcatttcagaagtgaaagttcaggtggaaaaccaggtacaaggcatctattttaacattaccgccatctgtccagatgggtccagaaagccaggcatggaaggatgcagaaacgtgacgagcaatgatgaagttcttttcaatgtaacagttacaatgaaaaaatgtgatgtcacaggaggaaaaaactatgcaataatcaaacctattggttttaatgaaaccgctaaaattcatatacacagaaactgcagctgtcagtgtgaggacaacagaggacctaaaggaaagtgtgtagatgaaacttttctagattccaagtgtttccagtgtgatgagaataaatgtcattttgatgaagatcagttttcttctgagagttgcaagtcacacaaggatcagcctgtttgcagtggtcgaggagtttgtgtttgtgggaaatgttcatgtcacaaaattaagcttggaaaagtgtatggaaaatactgtgaaaaggatgacttttcttgtccatatcaccatggaaatctgtgtgctgggcatggagagtgtgaagcaggcagatgccaatgcttcagtggctgggaaggtgatcgatgccagtgcccttcagcagcagcccagcactgtgtcaattcaaagggccaagtgtgcagtggaagaggcacgtgtgtgtgtggaaggtgtgagtgcaccgatcccaggagcatcggccgcttctgtgaacactgccccacctgttatacagcctgcaaggaaaactggaattgtatgcaatgccttcaccctcacaatttgtctcaggctatacttgatcagtgcaaaacctcatgtgctctcatggaacaacagcattatgtcgaccaaacttcagaatgtttctccagcccaagctacttgagaatatttttcatcattttcatagttacattcttgattgggttgcttaaagtcctgatcattagacaggtgatactacaatggaatagtaataaaattaagtcctcatcagattacagagtgtcagcctcaaaaaaggataagttgattctgcaaagtgtttgcacaagagcagtcacctaccgacgtgagaagcctgaagaaataaaaatggatatcagcaaattaaatgctcatgaaactttcaggtgcaacttctaaaaaaagatttttaaacacttaatgggaaactggaattgttaataattgctcctaaagattataattttaaaagtcacaggaggagacaaattgctcacggtcatgccagttgctggttgtacactcgaacgaagactgacaagtatcctcatcatgatgtgactcacatagctgctgactttttcagagaaaaatgtgtcttactactgtttgagactagtgtcgttgtagcactttactgtaatatataacttatttagatcagcatagaatgtagatcctctgaagagcactgattacactttacaggtacctgttatccctacgcttcccagagagaacaatgctgtgagagagtttagcattgtgtcactacaagggtacagtaatccctgcactggacatgtgaggaaaaaaataatctggcaagtatattctaaggttgccaaacacttcaacagttggtggttgaatagacaagaacagctagatgaataaatgattcgtgtttcactctttcaagaggtgaacagatacaaccttaatcttaaaagattattgctttttaaagtgtgtagttttatgcatgtgtgtttatggtttgcttatttttgcaagatggatactaattccagcattctctcctctttgcctttatgttttgttttcttttttacaggataagtttatgtatgtcacagatgactggattaattaagtgctaagttactactgccataaaaaactaataatacaatgtcactttatcagaatactagttttaaaagctgaatgttaataggggacactgtaaagtatcatcaaaacctgaatagcttcattgtgcacaagtgtggagttttgtatcctcttacctggtaaactgaagggattgtttggccatttcatttatcttatcattaattcacaagatagttagaaattctgcctcaagcaaagtaccacattttgaatgttttcttagattttgattgcaagtagatatcagcattttttaaatgaaaagctatattatcttctcccttcaaggcagcctaaggatgttctttcccagaatcactccaacccttcttgccagaattcataaaagtacaaaattggagaatagatgatatcttagaaataagctttttttttttttttttttttttttgagacggagtttcactcttgtcacccaggctgaagtgcaatggcgcaattagggttcactgcaacctctgcctcccgggttcaagcagttctcctgcctcagcctcctgagtagctgggattacaggcatccaccaccgtgcccagctaatttttgtatttttagtagagacggggttttgccatgttggacaggttgatctcaaactcctgacctcaggtgatctaccctcctcggcctcccagagtgttgggattacaggcatgagccaccatgccaggctgctaattctcctttttagtgagttagggaactgagcctcagaaaacttaaacgatttctcagaaaacactcaagtgataaagtggccacattggaaaggagtttttatcttctcattgtcaggccagtgttcattgcacaatatcatgctacctcttgaatctttaaaatattcaattggcaaatgtttttcaatgtgatttactcatgtcttaagtgtatgaggaaagttcaaagcaaaatagaaaggaataattcaaactgaattgtccataatcagcttccagtctttcatgctaatcagcttcttaagagactgaagtatggcatacctacaggggaattccttcgcaccatagcctgtatgaacagtgttccctggagttctccagtgctcagcttgagaccttgatacacgggccatgagccctgtcttccccaatggaaatttatttacacttaccttatccctatggacttagtctgattttattggctaggagtctaacagtcctgtgtggatatacagttttgcccatgacaacaaaggaatctatccgaaatatctttttttttataataaacttccaagatttgctgtcttccagcacttgagttaaagtactagatactgcattttgatgaagactaaccccatctcatattctaccctaaagagaactgaaaaacctataataagttgttctggagccaataaacacagcagctctgttagatgtcctctacagccaagcactttcaatgctaacttgaactgcatttccttcctcaaatgagagattgacataattcagtactgtgagtcacttgtataagaaacctttgatcactaaaaataatgtaaaaattgggtttagtagcctaatacacataacgttcttcttaaaaaggaaaatggatggatgcctgacaaccctccaaaagaaaaaagtgtaagatagccattaagatgatgacaatttttgaaatgaacattatgatatttatgaacaataaacaaatttccgtatggaatgaattatccaaaaagagtataacaaaatgaaatccttaaaaatccagagtttatattttttttataccctcacttgtttgcactaactttatagtggaccaaggctgttaccataggaagggacaaacttccttgtaggcaactcagtgttagacgatgattgtggttatgcttgcaaagtcttgtgcttatcttttttgtttttacttaaaaagctaatttttaaagattgtagggcttgtattttacttgaataattgatatcttcctgtgtaatgatttgtgagatgagaattaatatttgactagttagaattaattaaatggtaagggaacacagggtactcttaggttaaataatgtatgcaaatagagtctattttcaactaatatggccacaggagccttttgagattcattgatattaaacacaattaatgaaattttaaattgttaacagaattgagaacttgaacaacacttttagtactgcagcatttttgtgccctaaagtatgtaatgatttataaatgtgccatacatacactacaacataacatttgctttgttatgcattttatttctctggggacaccattgcactgcagtgcacacgtatttataaacatttgttatatttttggaaacttgctaatatttattaagtcatagacttttctggaggacttaaaaattcactaaaaatctgattatgtcttaaatgttcagtttatctttggtttattaaaataaaaaaaaaatctaagattaaacacagtagatatctctggaggcaattttccaaaactcaacattaaaatttgtggatgcatgagatgcaatccttcaaagaatgaatctgaaatatatttttaatatttacttaatatccactgaagatatctttatgcaagacaagagtcagccatcagacactgaaatatattatgatagattatgaagaattttctctgtagaattatattcttcctggaacctggtagagtagattagactcaaaggctttttcttccttttcttactcctgttttttccactcactcttcccaagagatttcctaaagcttcaagcttaataagcctaatagtgaaaaataactgaatttaatggtataatgaagttcttcatttccagacatctttaattgatcttaaagctcatttgagtctttgcccctgaacaaagacagacccattaaaatctaagaattctaaattttcacaactgtttgagcttcttttcattttgaaggatttggaatatatatgttttcataaaagtatcaagtgaaatatagttacatgggagctcaatcatgtgcagattgcattctgttatgttgactcaatatttaatttacaactatccttatttatattgacctcaagaactccattttatgcaatgcagaccactgagatatagctaacattctttcaaataattttccttttcttttataattcctctatagcaaatttttatgtataactgattatacatatccatatttatatttcattgattccaagacatcactttttcaatttaacatctctgaaattgtgacatttcttgcaactgttggcacttcagatgcagtgtttaaaattatgcttgaataaatattacactaatccaactttacctaaatgtttatgcatctaggcaaattttgttttcttataaagatttgagagcccatttatgacaaaatatgaaggcgaaatttaaggacaactgagtcacgcacaactcaacatggagcctaactgattatcagctcagatcccgcatatcttgagtttacaaaagctctttcaggtccccatttatactttacgtgagtgcgaatgatttcagcaaaccctaacttaactaacaagaatgggtaggtatgtctacgtttcattaacaaatttttattatttttattctattatatgagatccttttatattatcatctcacttttaaacaaaattaactggaaaaatattacatggaactgtcatagttaggttttgcagcatcttacatgtcttgtatcaatggcaggagaaaaatatgataaaaacaatcagtgctgtgaaaaacaactttcttctagagtcctcttactttttattcttctttatcatttgtgggtttttcccccttggctctgatcactttaacttcaagcttatgtaacgactgttataaaactgcatatttaaattatttgaattatatgaaataattgttcagctatctgggcagctgttaatgtaaacctgagagtaataacactactcttttatctacctggaatacttttctgcataaaatttatctttgtaagctaactctattaatcaggtttcttctagcctctgcaacctacttcagttagaattgtctaatactgctctattaatcaggtttctagcctctacaacctacttcagttaaaattgtctaatacagcaatatttaaaaaaaaaacactgcaattgtcaaggatggaaaatgtgtgatttgtgtaaacaatttttaccaactttacattttcctacagataaatgtgaaattttgataagaagtctacgcaatgacaagtatggtacataaattttattaagaatattgagtataaagtactttaattctaaattataagaaaatatacatttgcacatattaatatagaaattcattttgtgtatatttaacatagcttttaaactattttacattagctacttcattatggtttcttgaacttctgaaaaaaattagaaatgtattaaacttatcagtaacataaaaacttattttgtttcacctaacgaatactgcgtttgtaaaaataaatttaatatagaatatatttttaaattaaatatttgaatataaaatagctctaagaaagaagcaaattatcactgaacatatttcttattatttctggctttgaattatacgtaacttaaattgtcttaaatgatacagaatattggagaatatgatactttcacataatatactatgaacctgttcatataactctgattgactactaacttctgttttatgtatttattaaagagctgacactgtagtttgtggtgagatgtttatttttctaacagagcttataacagttaggacaaggcatttaattaatgcatcattctgtttagtagtaggtgttaatcaatatgaaattctctgttttaaaataaaaatgtaaaaatctaa

SEQ ID NO: 63 - DNA, 738 bp, Homo sapiens
agtctccgccttgcgagctcagagtgtgcccgctgcgccgccgctgtccgtacctgccgccgccgccaccgccaccatgcccaacttcgccggcacctggaagatgcgcagcagcgagaatttcgacgagctgctcaaggcactgggtgtgaacgccatgctgaggaaagtggccgtagcggctgcgtccaagccgcacgtggagatccgccaggacggggatcagttctacatcaagacatccaccacggtgcgcaccactgagatcaacttcaaggtcggagaaggctttgaggaggagaccgtggacggacgcaagtgcaggagtttagccacttgggagaatgagaacaagatccactgcacgcaaactcttcttgaaggggacggccccaaaacctactggacccgtgagctggccaacgatgaacttatcctgacgtttggcgccgatgacgtggtctgcaccagaatttatgtccgagagtgaaggcagctggcttgctcctactttcaggaagggatgcaggctcccctgaggaatatgtcatagttctgagctgccagtggaccgcccttttcccctaccaatattaggtgatcccgttttccccatgacaatgttgtagtgtcccccacccccaccccccaggccttggtgcctcttgtatccctagtgctccatagtttggcatttgcacggtttcgaagtcattaaactggttagacgtgtctcaa

SEQ ID NO: 64 - DNA, 5260 bp, Homo sapiens
agtctttgtgcagtcagggcttctgctgggcagggccggctgttaatctcgcctggcggagcggacaccggggcgtggtgggggagatgggccttataggtggcgtccgctggtgagaaacaccttgcgcaggtaaaagggtggcggcgagagggagttcccacccgtggctttcttagagaaatgaagtcttaagtcttaaatagacaacaaggaggggccgatcggtgtcttttggacgcgtctggagcccctccctccgccaaaggaaaagccccttggatgagaggcaggcgcttcagagaagctaagaaaagcacctctccgcgcgccccacctcctccgcctcgcgctcctcctgagcagcgggcccagactgcgctccggccgcggccctcgccccgcggagccctcctaccccggcccgacgctcggcccgcgacctgccccgagccctctccatggaggcagcccgcccctccggctcctggaacggagccctctgccggctgctcctgctgaccctcgcgatcttaatatttgccagtgatgcctgcaaaaatgtgacattacatgttccctccaaactagatgccgagaaacttgttggtagagttaacctgaaagagtgctttacagctgcaaatctaattcattcaagtgatcctgacttccaaattttggaggatggttcagtctatacaacaaatactattctattgtcctcggagaagagaagttttaccatattactttccaacactgagaaccaagaaaagaagaaaatatttgtctttttggagcatcaaacaaaggtcctaaagaaaagacatactaaagaaaaagttctaaggcgcgccaagagaagatgggctccaattccttgttcgatgctagaaaactccttgggtccttttccacttttccttcaacaggttcaatctgacacggcccaaaactataccatatactattccataagaggtcctggagttgaccaagaacctcggaatttattttatgtggagagagacactggaaacttgtattgtactcgtcctgtagatcgtgagcagtatgaatcttttgagataattgcctttgcaacaactccagatgggtatactccagaacttccactgcccctaataatcaaaatagaggatgaaaatgataactacccaatttttacagaagaaacttatacttttacaatttttgaaaattgcagagtgggcactactgtgggacaagtgtgtgctactgacaaagatgagcctgacacgatgcacacacgcctgaagtactccatcattgggcaggtgccaccatcacccaccctattttctatgcatccaactacaggcgtgatcaccacaacatcatctcagctagacagagagttaattgacaagtaccagttgaaaataaaagtacaagacatggatggtcagtattttggtctacagacaacttcaacttgtatcattaacattgatgatgtaaatgaccacttgccaacatttactcgtacttcttatgtgacatcagtggaagaaaatacagttgatgtggaaatcttacgagttactgttgaggataaggacttagtgaatactgctaactggagagctaattataccattttaaagggcaatgaaaatggcaattttaaaattgtaacagatgccaaaaccaatgaaggagttctttgtgtagttaagcctttgaattatgaagaaaagcaacagatgatcttgcaaattggtgtagttaatgaagctccattttccagagaggctagtccaagatcagccatgagcacagcaacagttactgttaatgtagaagatcaggatgagggccctgagtgtaaccctccaatacagactgttcgcatgaaagaaaatgcagaagtgggaacaacaagcaatggatataaagcatatgacccagaaacaagaagtagcagtggcataaggtataagaaattaactgatccaacagggtgggtcaccattgatgaaaatacaggatcaatcaaagttttcagaagcctggatagagaggcagagaccatcaaaaatggcatatataatattacagtccttgcatcagaccaaggagggagaacatgtacggggacactgggcattatacttcaagacgtgaatgataacagcccattcatacctaaaaagacagtgatcatctgcaaacccaccatgtcatctgcggagattgttgcggttgatcctgatgagcctatccatggcccaccctttgactttagtctggagagttctacttcagaagtacagagaatgtggagactgaaagcaattaatgatacagcagcacgtctttcctatcagaatgatcctccatttggctcatatgtagtacctataacagtgagagatagacttggcatgtctagtgtcacttcattggatgttacactgtgtgactgcattaccgaaaatgactgcacacatcgtgtagatccaaggattggcggtggaggagtacaacttggaaagtgggccatccttgcaatattgttgggcatagcattgctcttttgcatcctgtttacgctggtctgtggggcttctgggacgtctaaacaaccaaaagtaattcctgatgatttagcccagcagaacctaattgtatcaaacacagaagctcctggagatgacaaagtgtattctgcgaatggcttcacaacccaaactgtgggcgcttctgctcagggagtttgtggcaccgtgggatcaggaatcaaaaacggaggtcaggagaccatcgaaatggtgaaaggaggacaccagacctcggaatcctgccggggggctggccaccatcacaccctggactcctgcaggggaggacacacggaggtggacaactgcagatacacttactcggagtggcacagttttactcagccccgtcttggtgaagaatccattagaggacacactctgattaaaaattaaacaatgaaagaaagtgtatctgtgtaatcaagatgaaaatcacaagcatgcccaagactatgtcctgacatataactatgaaggaagaggatcggtggctgggtctgtaggttgttgcagtgaacgacaagaagaagatgggcttgaatttttggataatttggagcccaaatttaggacactagcagaagcatgcatgaagagatgagtgtgttctaataagtctctgaaagccagtggctttatgacttttaaaaaaaattacaaaccaagaattttttaaagcagaagatgctatttgtgggggtttttctctcattatttggatggaatctctttggtcaaatgcacatttacagagagacactataaacaagtacacaaatttttcaatttttacatatttttaaattacttatcttctatccaaggaggtctacagagaaattaaagtctgccttatttgttacatttgggtataatgacaacagccaatttatagtgcaataaaatgtaattaattcaagtccttattatagactatttgaagcacaacctaatggaaaattgtagagaccttgctttaacattatctccagttaattaagtgttcatgtggtgcttggaaactgttgttttcctgaacatctaaagtgtgtagactgcattcttgctattattttattcttgtaatgtgaccttttcactgtgcaaagggagatttctagccaggcattgactattacaatttcattttggtggagtttagttttaggttttattgtatataaaatcctgcactgaatctgtgtctcctctgttacctacttttgccagtgaaatttaagttttaaaatactttcagaatgtatttttactactgcaagtttttggtctttaaaatgtcaagtagcatctctctctttctctctgtctctttctgtttctctctccagttttttttttttttttaatttccatatgggctaaagaatccaaatattttaaaaatctgtctctcttttcttctctcataaagtgaattattccttttttttgttttatgtaagtgtatatattcttagtttttcttgaaatcattgtaatgttaactttgttgtttcaaatatcttggtgattgcttcattatctcttcaacaaaaaaaacctttaattttgccattgaaactgtagaactatgccatgcttttattagaagcagtgctctgtgttaacaacaagaatggtgtaattagaattgggatgtggatatttactgtatgacaacacatttacagttctgtaatgcaaggatgcagtttaaaaatgtgaagtagtgatggtttttgaaataagctttaaaatatagggatcttgaaggctccctggggtaactattttataacttagataaaatggctagtcatatctgtgtgtttgtaaagttatttttttaatattttaagattacaattttaacaaatgtagaaatgagccaaactatttaaattttaaaacagtaaaacaaaatgaaacttaatagctcacaaaattccagtccatgtttcatgacttattttagtcaatgaattttctatttatactaaacatatggacattttaaatgtgtttctaatatttttgattatctataatgtgcctgtcttcaattcacaagattgggttataacaattatttgccagattaacactagggaattatttgataaccagcttatcttatcagtagttttattgctgatcaggcaaaaatagttttccaaagttatttttaataaagtatatacaaaattcttatatattactagtcatgataaagtaaattaagcagtttttaaaacttagtgtgagtttgttcatcacaggtctgatatgagtttaagggatttcgcactccctgaatcagagaagtaagaccccttccttagattcctgttatacattttttaaaatgtagagtttgttttggagacattttcagtgcattgttattgccatatttatataatatgactattctaaaggctgtgaggccatggggtattggttaagttgcttgcttttgctttgtccattttcatcattttaaaatgggggataataacagaacttgtttcctagggccattgtaagtcacttgaataaaaaatagttttgaagcatgagagtcatacagagcggtccacctaaaaggcactcctgataataataaatgattttaaacaagtaaaaaa

SEQ ID NO: 65 - DNA, 1955 bp, Homo sapiens
gaagattttggagcccagctgtgtgccagcccaagtcggaacttggatcacatcagatcctctcgagctccagcaggagaggcccttcctcgcctggcagcccctgagcggctcagcagggcaccatggcaagatcccttctcctgcccctgcagatcttactgctatccttagccttggaaactgcaggagaagaagcccagggtgacaagattattgatggcgccccatgtgcaagaggctcccacccatggcaggtggccctgctcagtggcaatcagctccactgcggaggcgtcctggtcaatgagcgctgggtgctcactgccgcccactgcaagatgaatgagtacaccgtgcacctgggcagtgatacgctgggcgacaggagagctcagaggatcaaggcctcgaagtcattccgccaccccggctactccacacagacccatgttaatgacctcatgctcgtgaagctcaatagccaggccaggctgtcatccatggtgaagaaagtcaggctgccctcccgctgcgaaccccctggaaccacctgtactgtctccggctggggcactaccacgagcccagatgtgacctttccctctgacctcatgtgcgtggatgtcaagctcatctccccccaggactgcacgaaggtttacaaggacttactggaaaattccatgctgtgcgctggcatccccgactccaagaaaaacgcctgcaatggtgactcagggggaccgttggtgtgcagaggtaccctgcaaggtctggtgtcctggggaactttcccttgcggccaacccaatgacccaggagtctacactcaagtgtgcaagttcaccaagtggataaatgacaccatgaaaaagcatcgctaacgccacactgagttaattaactgtgtgcttccaacagaaaatgcacaggagtgaggacgccgatgacctatgaagtcaaatttgactttacctttcctcaaagatatatttaaaccaacctcatgccctgttgataaaccaatcaaattggtaaagacctaaaaccaaaacaaataaagaaacacaaaaccctcagtgctggagaagagtcagtgagaccagcactctcaaacactggaactggacgttcgtacagtctttacggaagacacttggtcaacgtacaccgagacccttattcaccacctttgacccagtaactctaatcttaggaagaacctactgaaacaaaaaaaatccaaaatgtagaacaagacttgaatttaccatgatattatttatcacagaaatgaagtgaaaccatcaaacatgttccaaaagtaccagatggcttaaataatagtctggcttggcacaacgatgttttttttctttgagacagagtctctgttgcttgggctgcaatgcagtgatgcaatcttggctcactgcaacctccgcctcctgggttcaagtgattctcgtgcttcagcctcccaagtacctgggactacaggtgtgcaccaccacaccaggctaattttttgtgtatttttactagagacagggtttcaccatgttggccagcatggtcttgaacgcctgacctcagatgatccacccaccttggcctcccaaagtgctgggattacaggcatgagccaccacggccagcccacaatgatattacaaacctattaaaaatgatacttagacagaattgtcagtattattcaagaacatttaggctataggatgttaaatgacaaaaggaaggacaaaaatatatatgtatgtgaccctacccataaaaaatgaaatattcacagaatcagatctgaaaacacatgtcccagactgcatactggggtcgtcatgaggtgtctccttccttctgtgtacttttccttgaatgtgcacttttataacatgaaaaataaaggtggggaaaaaagtctgaagatctaa

SEQ ID NO: 66 - DNA, 1936 bp, Homo sapiens
agaaccccgcggggtctgagcagcccagcgtgcccattccagcgcccgcgtccccgcagcatgccgcgcccccgcctgctggccgcgctgtgcggcgcgctgctctgcgcccccagcctcctcgtcgccctggatatctgttccaaaaacccctgccacaacggtggtttatgcgaggagatttcccaagaagtgcgaggagatgtcttcccctcgtacacctgcacgtgccttaagggctacgcgggcaaccactgtgagacgaaatgtgtcgagccactgggcctggagaatgggaacattgccaactcacagatcgccgcctcgtctgtgcgtgtgaccttcttgggtttgcagcattgggtcccggagctggcccgcctgaaccgcgcaggcatggtcaatgcctggacacccagcagcaatgacgataacccctggatccaggtgaacctgctgcggaggatgtgggtaacaggtgtggtgacgcagggtgccagccgcttggccagtcatgagtacctgaaggccttcaaggtggcctacagccttaatggacacgaattcgatttcatccatgatgttaataaaaaacacaaggagtttgtgggtaactggaacaaaaacgcggtgcatgtcaacctgtttgagacccctgtggaggctcagtacgtgagattgtaccccacgagctgccacacggcctgcactctgcgctttgagctactgggctgtgagctgaacggatgcgccaatcccctgggcctgaagaataacagcatccctgacaagcagatcacggcctccagcagctacaagacctggggcttgcatctcttcagctggaacccctcctatgcacggctggacaagcagggcaacttcaacgcctgggttgcggggagctacggtaacgatcagtggctgcaggtggacctgggctcctcgaaggaggtgacaggcatcatcacccagggggcccgtaactttggctctgtccagtttgtggcatcctacaaggttgcctacagtaatgacagtgcgaactggactgagtaccaggaccccaggactggcagcagtaagatcttccctggcaactgggacaaccactcccacaagaagaacttgtttgagacgcccatcctggctcgctatgtgcgcatcctgcctgtagcctggcacaaccgcatcgccctgcgcctggagctgctgggctgttagtggccacctgccacccccaggtcttcctgctttccatgggcccgctgcctcttggcttctcagcccctttaaatcaccatagggctggggactggggaaggggagggtgttcagaggcagcaccaccacacagtcacccctccctccctctttcccaccctccacctctcacgggccctgccccagcccctaagccccgtcccctaacccccagtcctcactgtcctgttttcttaggcactgagggatctgagtaggtctgggatggacaggaaagggcaaagtagggcgtgtggtttccctgcccctgtccggaccgccgatcccaggtgcgtgtgtctctgtctctcctagcccctctctcacacatcacattcccatggtggcctcaagaaaggcccggaagcgccaggctggagataacagcctcttgcccgtcggccctgcgtcggccctggggtaccatgtggccacaactgctgtggccccctgtccccaagacacttccccttgtctccctggttgcctctcttgccccttgtcctgaagcccagcgacacagaagggggtggggcgggtctatggggagaaagggagcgaggtcagaggagggcatgggttggcagggtgggcgtttggggccctctatgctggcttttcaccccagaggacacaggcagcttccaaaatatatttatcttcttcacgggaa

SEQ ID NO: 67 - DNA, 3964 bp, Homo sapiens
gcacttaaggagctcgggccagcgcgagggggagcagggaggaagcccggctgctgcggacctcctcggacccggacccagccccagcccggccccagccagccccgacggcgccatgcggggtccgagcggggctctgtggctgctcctggctctgcgcaccgtgctcggtggcatggaggtgcggtggtgcgccacctcggacccagagcagcacaagtgcggcaacatgagcgaggccttccgggaagcgggcatccagccctccctcctctgcgtccggggcacctccgccgaccactgcgtccagctcatcgcggcccaggaggctgacgccatcactctggatggaggagccatctatgaggcgggaaaggagcacggcctgaagccggtggtgggcgaagtgtacgatcaagaggtcggtacctcctattacgccgtggctgtggtcaggaggagctcccatgtgaccattgacaccctgaaaggcgtgaagtcctgccacacgggcatcaatcgcacagtgggctggaacgtgcccgtgggctacctggtggagagcggccgcctctcggtgatgggctgcgatgtactcaaagctgtcagcgactattttgggggcagctgcgtcccgggggcaggagagaccagttactctgagtccctctgtcgcctctgcaggggtgacagctctggggaaggggtgtgtgacaagagccccctggagagatactacgactacagcggggccttccggtgcctggcggaaggggcaggggacgtggcttttgtgaagcacagcacggtactggagaacacggatgggaagacgcttccctcctggggccaggccctgctgtcacaggacttcgagctgctgtgccgggatggtagccgggccgatgtcaccgagtggaggcagtgccatctggcccgggtgcctgctcacgccgtggtggtccgggccgacacagatgggggcctcatcttccggctgctcaacgaaggccagcgtctgttcagccacgagggcagcagcttccagatgttcagctctgaggcctatggccagaaggatctactcttcaaagactctacctcggagcttgtgcccatcgccacacagacctatgaggcgtggctgggccatgagtacctgcacgccatgaagggtctgctctgtgaccccaaccggctgcccccctacctgcgctggtgtgtgctctccactcccgagatccagaagtgtggagacatggccgtggccttccgccggcagcggctcaagccagagatccagtgcgtgtcagccaagtccccccaacactgcatggagcggatccaggctgagcaggtcgacgctgtgaccctgagtggcgaggacatttacacggcggggaagacgtacggcctggttcccgcagccggggagcactatgccccggaagacagcagcaactcgtactacgtggtggccgtggtgagacgggacagctcccacgccttcaccttggatgagcttcggggcaagcgctcctgccacgccggtttcggcagccctgcaggctgggatgtccccgtgggtgcccttattcagagaggcttcatccggcccaaggactgtgacgtcctcacagcagtgagcgagttcttcaatgccagctgcgtgcccgtgaacaaccccaagaactacccctcctcgctgtgtgcactgtgcgtgggggacgagcagggccgcaacaagtgtgtgggcaacagccaggagcggtattacggctaccgcggcgccttcaggtgcctggtggagaatgcgggtgacgttgccttcgtcaggcacacaaccgtctttgacaacacaaacggccacaattccgagccctgggctgctgagctcaggtcagaggactatgaactgctgtgccccaacggggcccgagccgaggtgtcccagtttgcagcctgcaacctggcacagataccaccccacgccgtgatggtccggcccgacaccaacatcttcaccgtgtatggactgctggacaaggcccaggacctgtttggagacgaccacaataagaacgggttcaaaatgttcgactcctccaactatcatggccaagacctgcttttcaaggatgccaccgtccgggcggtgcctgtcggagagaaaaccacctaccgcggctggctggggctggactacgtggcggcgctggaagggatgtcgtctcagcagtgctcgggcgcagcggccccggcgcccggggcgcccctgctcccgctgctgctgcccgccctcgccgcccgcctgctcccgcccgccctctgagcccggccgccccgccccagagctccgatgcccgcccggggagtttccgcggcggcttcgcgctggaatccagaaggaagctcgcgaaggccgggcccggcgtgggcgggagcaggcgcctccccgggagccccgccgcccacgggcgccacctggcgctgctacctgaggcgccgcccccgggcccgcgcggcccttcccgccaaccgccgcctcccgccacctggagccgcgcgggccgcgccggaggaggccggttgcccaggaaaccgctgagtccgggcttcccgccgcccgccccgcggtgtcgcccgaggggcccgcccgcctcctccccgcagccccgcgcccccgtccgcgaggccccctggggacgcggtggccgccgaggcgcctacacccgcaggccgcggccaggccgtcccaggaggccccggcgccaacgggacccggcgcgtgggacagcggcctctgctggcggcggcgggagggaggccggaccggggcgacggggagaagccttcgcccgcgggaccgtgtccggggtgggggctccagttcctccgaccgcccgtgcgctgggagggaggccgagcccggggaacgccgcgtgccctgcctcgtcccccactgtggccgcgccagctccatcccgggccagccgcgtccacgggccccctcccgagtctcctcaggctctcgcctcccctacccccgtgggatgcccaccgcccgcacccacgcccgagcctggcggcagcagccgccccccgcctgaagggagccggaggtgacccaggccgcgggctcccgaggcccctgaagggctgcgcgtggggacccgccatgcttctgggttccgaacgggggtgagctccgtctcctcacccggccccgcacccgctgggcctggggacccctcactccccgtgcccgcccctccgcgaggcagcagaaagcgcccggccggggcctctctctactccatcttgccacagttgtctgagaagccagaaaaagtttccagaactggcagcccttaaaaaaaatgaagaggaagagaagaaatgggagcaggcagccctcgtcagcagaccgggagccgcgtgggcgcggagccatttgcattccggtctgcgggggctcggggatgctggtgacaggcccggttcccggtggctcgcccccacctgcgggcgtcgggaaggatcccttccatctctcagccgcagaggaggccctggcagcgccccggctgtagccatgcaaccccgaggagtcccgggcaccttcaccccaccgggaggggccacaaggacctgggcctcggccaccaagctttgtcccctctcgctgtggggggctagtgattctcctccgacctgacgattgcttggttttttcaaaagggagttttgtgcggtgagaagtgtgtttctgtgtggctaactctgggctagcgtgccgtggccattgaaggtgtggcctgcgtgggtgcagtgtaagtgacgctggattgtcaggtggcagcaggggacccctgctgtgtcagtgctaatgaaacatgttggttggtttctaaaataaagccaaacaagccagcacatgcagaggcttggaccctgatagaaa

SEQ ID NO: 68 - DNA, 3977 bp, Homo sapiens
ggatggtgccttgagtgaatgacccccttggagaacattcttccgcatccctcgcctcaagccagcctcagacagaaaactgaagattcagcagatccagtgcttcctgctcctcttctgcccaggaacacgcttgccttccccaaggcttccagaagctctgaggcaggaggcaccaagttctacctcatgtttggaggatcttgctagctatggccctcgtactcggctccctgttgctgctggggctgtgcgggaactccttttcaggagggcagccttcatccacagatgctcctaaggcttggaattatgaattgcctgcaacaaattatgagacccaagactcccataaagctggacccattggcattctctttgaactagtgcatatctttctctatgtggtacagccgcgtgatttcccagaagatactttgagaaaattcttacagaaggcatatgaatccaaaattgattatgacaagccagaaactgtaatcttaggtctaaagattgtctactatgaagcagggattattctatgctgtgtcctggggctgctgtttattattctgatgcctctggtggggtatttcttttgtatgtgtcgttgctgtaacaaatgtggtggagaaatgcaccagcgacagaaggaaaatgggcccttcctgaggaaatgctttgcaatctccctgttggtgatttgtataataataagcattggcatcttctatggttttgtggcaaatcaccaggtaagaacccggatcaaaaggagtcggaaactggcagatagcaatttcaaggacttgcgaactctcttgaatgaaactccagagcaaatcaaatatatattggcccagtacaacactaccaaggacaaggcgttcacagatctgaacagtatcaattcagtgctaggaggcggaattcttgaccgactgagacccaacatcatccctgttcttgatgagattaagtccatggcaacagcgatcaaggagaccaaagaggcgttggagaacatgaacagcaccttgaagagcttgcaccaacaaagtacacagcttagcagcagtctgaccagcgtgaaaactagcctgcggtcatctctcaatgaccctctgtgcttggtgcatccatcaagtgaaacctgcaacagcatcagattgtctctaagccagctgaatagcaaccctgaactgaggcagcttccacccgtggatgcagaacttgacaacgttaataacgttcttaggacagatttggatggcctggtccaacagggctatcaatcccttaatgatatacctgacagagtacaacgccaaaccacgactgtcgtagcaggtatcaaaagggtcttgaattccattggttcagatatcgacaatgtaactcagcgtcttcctattcaggatatactctcagcattctctgtttatgttaataacactgaaagttacatccacagaaatttacctacattggaagagtatgattcatactggtggctgggtggcctggtcatctgctctctgctgaccctcatcgtgattttttactacctgggcttactgtgtggcgtgtgcggctatgacaggcatgccaccccgaccacccgaggctgtgtctccaacaccggaggcgtcttcctcatggttggagttggattaagtttcctcttttgctggatattgatgatcattgtggttcttacctttgtctttggtgcaaatgtggaaaaactgatctgtgaaccttacacgagcaaggaattattccgggttttggatacaccctacttactaaatgaagactgggaatactatctctctgggaagctatttaataaatcaaaaatgaagctcacttttgaacaagtttacagtgactgcaaaaaaaatagaggcacttacggcactcttcacctgcagaacagcttcaatatcagtgaacatctcaacattaatgagcatactggaagcataagcagtgaattggaaagtctgaaggtaaatcttaatatctttctgttgggtgcagcaggaagaaaaaaccttcaggattttgctgcttgtggaatagacagaatgaattatgacagctacttggctcagactggtaaatcccccgcaggagtgaatcttttatcatttgcatatgatctagaagcaaaagcaaacagtttgcccccaggaaatttgaggaactccctgaaaagagatgcacaaactattaaaacaattcaccagcaacgagtccttcctatagaacaatcactgagcactctataccaaagcgtcaagatacttcaacgcacagggaatggattgttggagagagtaactaggattctagcttctctggattttgctcagaacttcatcacaaacaatacttcctctgttattattgaggaaactaagaagtatgggagaacaataataggatattttgaacattatctgcagtggatcgagttctctatcagtgagaaagtggcatcgtgcaaacctgtggccaccgctctagatactgctgttgatgtctttctgtgtagctacattatcgaccccttgaatttgttttggtttggcataggaaaagctactgtatttttacttccggctctaatttttgcggtaaaactggctaagtactatcgtcgaatggattcggaggacgtgtacgatgatgttgaaactatacccatgaaaaatatggaaaatggtaataatggttatcataaagatcatgtatatggtattcacaatcctgttatgacaagcccatcacaacattgatagctgatgttgaaactgcttgagcatcaggatactcaaagtggaaaggatcacagatttttggtagtttctgggtctacaaggactttccaaatccaggagcaacgccagtggcaacgtagtgactcaggcgggcaccaaggcaacggcaccattggtctctgggtagtgctttaagaatgaacacaatcacgttatagtccatggtccatcactattcaaggatgactccctcccttcctgtctatttttgttttttacttttttacactgagtttctatttagacactacaacatatggggtgtttgttcccattggatgcatttctatcaaaactctatcaaatgtgatggctagattctaacatattgccatgtgtggagtgtgctgaacacacaccagtttacaggaaagatgcattttgtgtacagtaaacggtgtatataccttttgttaccacagagttttttaaacaaatgagtattataggactttcttctaaatgagctaaataagtcaccattgacttcttggtgctgttgaaaataatccattttcactaaaagtgtgtgaaacctacagcatattcttcacgcagagattttcatctattatactttatcaaagattggccatgttccacttggaaatggcatgcaaaagcaatcatagagaaacctgcgtaactccatctgacaaattcaaaagagagagagagatcttgagagagaaatgctgttcgttcaaaagtggagttgttttaacagatgccaattacggtgtacagtttaacagagttttctgttgcattaggataaacattaattggagtgcagctaacatgagtatcatcagactagtatcaagtgttctaaaatgaaatatgagaagatcctgtcacaattcttagatctggtgtccagcatggatgaaacctttgagtttggtccctaaatttgcatgaaagcacaaggtaaatattcatttgcttcaggagtttcatgttggatctgtcattatcaaaagtgatcagcaatgaagaactggtcggacaaaatttaacgttgatgtaatgaaattccagatgtaggcattccccccaggtcttttcatgtgcagattgcagttctgattcatttgaataaaaaggaacttggaaaacatg

SEQ ID NO: 69 - DNA, 607 bp, Homo sapiens
ggactgttgaagacaggtctccacacacagctccagcagccacatttgcaaccttggccatctgtccagaacctgctcccacctcaggcccaggccaaccgtgcactgctgcaatgggctctgagctggagacggcgatggagaccctcatcaacgtgttccacgcccactcgggcaaagagggggacaagtacaagctgagcaagaaggagctgaaagagctgctgcagacggagctctctggcttcctggatgcccagaaggatgtggatgctgtggacaaggtgatgaaggagctagacgagaatggagacggggaggtggacttccaggagtatgtggtgcttgtggctgctctcacagtggcctgtaacaatttcttctgggagaacagttgagcagacagccacattgggcagcgcccttcctctccaccctcccagacctgcctcttccccctgcttccacctcaccccacttatccctctccataaccccacccttgcccaccccacccccacccccaccaagggcgcaagagtagcggtccaagcctgcaactcatctttcattaaaggcttctctctcaccagcaaaaaaaaaaaaa

SEQ ID NO: 70 - DNA, 1109 bp, Homo sapiens
gccgcccaggacccgcagcagagacgacgcctgcagcaaggagaccaggaaggggtgagacaaggaagaggatgtctgagctggagaaggccatggtggccctcatcgacgttttccaccaatattctggaagggagggagacaagcacaagctgaagaaatccgaactgaaggagctcatcaacaatgagctttcccatttcttagaggaaatcaaagagcaggaggttgtggacaaagtcatggaaacactggacaatgatggagacggcgaatgtgacttccaggaattcatggcctttgttgccatggttactactgcctgccacgagttctttgaacatgagtgagattagaaagcagccaaacctttcctgtaacagagacggtcatgcaagaaagcagacagcaagggcttgcagcctagtaggagctgagctttccagccgtgttgtagctaattaggaagcttgatttgctttgtgattgaaaaattgaaaacctctttccaaaggctgttttaacggcctgcatcattctttctgctatattaggcctgtgtgtaagctgactggccccagggactcttgttaacagtaacttaggagtcaggtctcagtgataaagcgtgcaccgtgcagcccgccatggccgtgtagaccctaacccggagggaaccctgactacagaaattaccccggggcacccttaaaacttccactacctttaaaaaacaaagccttatccagcattatttgaaaacactgctgttctttaaatgcgttcctcatccatgcagataacagctggttggccggtgtggccctgcaagggcgtggtggcttcggcctgcttcccgggatgcgcctgatcaccaggtgaacgctcagcgctggcagcgctcctggaaaaagcaactccatcagaactcgcaatccgagccagctctgggggctccagcgtggcctccgtgacccatgcgattcaagtcgcggctgcaggatccttgcctccaacgtgcctccagcacatgcggcttccgagggcactaccgggggctctgagccaccgcgagggcctgcgttcaataaaaagagcgcagcttggga

SEQ ID NO: 71 - DNA, 1853 bp, Homo sapiens
gccaaagggaagtgctgcgaggtttacaaccagctgcagtggttcgatgggaaggatctttctccaagtggttcctcttgaggggagcatttctgctggctccaggactttggccatctataaagcttggcaatgagaaataagaaaattctcaaggaggacgagctcttgagtgagacccaacaagctgcttttcaccaaattgcaatggagcctttcgaaatcaatgttccaaagcccaagaggagaaatggggtgaacttctccctagctgtggtggtcatctacctgatcctgctcaccgctggcgctgggctgctggtggtccaagttctgaatctgcaggcgcggctccgggtcctggagatgtatttcctcaatgacactctggcggctgaggacagcccgtccttctccttgctgcagtcagcacaccctggagaacacctggctcagggtgcatcgaggctgcaagtcctgcaggcccaactcacctgggtccgcgtcagccatgagcacttgctgcagcgggtagacaacttcactcagaacccagggatgttcagaatcaaaggtgaacaaggcgccccaggtcttcaaggtcacaagggggccatgggcatgcctggtgcccctggcccgccgggaccacctgctgagaagggagccaagggggctatgggacgagatggagcaacaggcccctcgggaccccaaggcccaccgggagtcaagggagaggcgggcctccaaggaccccagggtgctccagggaagcaaggagccactggcaccccaggaccccaaggagagaagggcagcaaaggcgatgggggtctcattggcccaaaaggggaaactggaactaagggagagaaaggagacctgggtctcccaggaagcaaaggggacaggggcatgaaaggagatgcaggggtcatggggcctcctggagcccaggggagtaaaggtgacttcgggaggccaggcccaccaggtttggctggttttcctggagctaaaggagatcaaggacaacctggactgcagggtgttccgggccctcctggtgcagtgggacacccaggtgccaagggtgagcctggcagtgctggctcccctgggcgagcaggacttccagggagccccgggagtccaggagccacaggcctgaaaggaagcaaaggggacacaggacttcaaggacagcaaggaagaaaaggagaatcaggagttccaggccctgcaggtgtgaagggagaacaggggagcccagggctggcaggtcccaagggagcccctggacaagctggccagaagggagaccagggagtgaaaggatcttctggggagcaaggagtaaagggagaaaaaggtgaaagaggtgaaaactcagtgtccgtcaggattgtcggcagtagtaaccgaggccgggctgaagtttactacagtggtacctgggggacaatttgcgatgacgagtggcaaaattctgatgccattgtcttctgccgcatgctgggttactccaaaggaagggccctgtacaaagtgggagctggcactgggcagatctggctggataatgttcagtgtcggggcacggagagtaccctgtggagctgcaccaagaatagctggggccatcatgactgcagccacgaggaggacgcaggcgtggagtgcagcgtctgacccggaaaccctttcacttctctgctcccgaggtgtcctcgggctcatatgtgggaaggcagaggatctctgaggagttccctggggacaactgagcagcctctggagaggggccattaataaagctcaacatcattggcaaaaaaaaaaaaaaaaaa

SEQ ID NO: 72 - DNA, 4000 bp, Homo sapiens
agcatttaagaagcatcctctgccaagaccaaaaggaaagaagaaaaagggccaaaagccaaaatgaaactgatggtacttgttttcaccattgggctaactttgctgctaggagttcaagccatgcctgcaaatcgcctctcttgctacagaaagatactaaaagatcacaactgtcacaaccttccggaaggagtagctgacctgacacagattgatgtcaatgtccaggatcatttctgggatgggaagggatgtgagatgatctgttactgcaacttcagcgaattgctctgctgcccaaaagacgttttctttggaccaaagatctctttcgtgattccttgcaacaatcaatgagaatcttcatgtattctggagaacaccattcctgatttcccacaaactgcactacatcagtataactgcatttctagtttctatatagtgcaatagagcatagattctataaattcttacttgtctaagacaagtaaatctgtgttaaacaagtagtaataaaagttaattcaatctaatttttctctgtggacattgttggcattggttaaaaattttgcctagaaaatgtaatctatgaggtgttcattatactcagttaaagagttctgtcccccagatgaagagccataggcatggctcaaggattgaaaatactttcagtccttagttgacagttattaaccacatattgaaagaaccaggtataagctgagattcttggaagggagctagaaattttctagtaagaaggaaaaagggaccagcctgggcaacatagtgagaccccctctttacaaaaaaattaaaaaattagcaggttgtgggtgcccacatctgtagttctagttactcaagagggtcatttgaatctagaatttcgagtctgcagtgagctatgattgcactactgcactctagcctgggtgacagagcaagaccctgtctcgaaaaaaaaaaaaaaaaaaaaaaaaggaaaagggaacaatatttgagggtatattatgtatgctaataactttaagtacatttcaggctgggactggtgactaatgcctgtaatcctagcattttgggaggccaaggcgggaagatcacttgagtccaggagtttgagaccagcctgggcaacatagtgagatcctgtctttacaaaaaaaatttaaaaattagctgcatggcggcatgcacctgtagtcccagctatttgggaggctgaggtaggaggatcactcgagcccagaaattcaaggctgcagtgagctaagatgatgccactgaactccaccatggaaccacagagtgagactctgtctcaaacaaacaaacaaaaaccaagaactttaagcacatttcattttactctcttaaaaaacaacaacaaaagccttcaaggtaaatattctcagccccatttttcagctgctaactcaagtttaagatatttgctaaaaatcaaggcagattttcaagagttccaattccaaagcccatatgccacacacagatgtatccttaaaaccatgatacatttcctaaagtatccatttttaagaataacaaaacacacattaaaagaaacataatggatgagaatttaaaagtatcatacattttaaaagtaaataaaacagggaacttcaaaggtattttctgattgttagaggagacagctttggattatgccccataacttaagaggtatgtgactcatattgccatcagaggtaatgtcagaaagtctttcatgttataaaaatgtattcaaagcctgctaagtgccagccattattaagatctgggcatacagtaatgaataaaatggacttatcttcttggaacttgtgctctaacaaaggtgtgattgctataaacaagtaattatttataaatgtgaagcctgctacagagaagtatagggtgccatacaaagtattgtggggaaatgtttgagagacaccataccacacaggcaatctgggagatatcattttatgaataaaagtgacattatttcattaaaatatatccttggaggtccctgatctgtttctggagaccacacccagaacagtatctggtatctaatctgtgtttagtaagtgttactgggctgaaagaccacacccaaaacagtgtctggtatctaatctgtgtaaataagtgttactgggctggaccaaacaattttgaggtagtcacaattcagtgtcttaaagtgtatataaacacggctgggtgcggtggctcacgcctgtaatcccagcactttgggaggcggaggcgggcttatcacgaggtcaggagatcaagaccatcctggctaatacggtgaaacctcgtctctactaaaaatacaaaaaaaaaaaaaaaaaaaattagctgggcgtggtggcaggcgcctctagtcccagctatttgggaggctgaggcaggagaatggcgtgaacccaggaggtggagcttgcagtgagctgagatcgtgccactgcactccagcctgggcgacagagtgagactccgtccccccaaaaaaaaagtgtatataaacacaagtcagaacatgttttcgaacagtgtaagctcctataaaatacatgaagtgaaattgtaaaataatatagataggtaggtagatggataatattagttgttttatcaagatagcatgtgatttgattggcctttctttcttcactgaattgactggtaatgaaatcagcctaactcaataatgaaagtttcatatccattctggaacaatgcatagaataggtaaatttaaaaaaactatcagcaaaccagttttattttctacttggtaggaactctccttgagggggaaaaagcattaaagatccagtgtctccatttacaaatgacacatcagcataaggacatatgtgagacaacaacggctttttagtaaacgttcccttactactgcaatcaaagcctggtaagaaaaattgtatctaacaaagctaaatatttaataaataaaattttataaattattcatcataatgtctttctgaaaatatgaaattcagttatttcttttagaaatgaatgcattatacaagtacacagccttctttatattacaaaataaatgtaaaaacatacattcacacaacttaccttatataactatttctctaacttggtcaatgcatttttaaaaacaatagatttttttttttttttgaaactgagtctcactctgtcacccaggccagagtacagtggcacaatcttgactcactgcaacctctgcctcccaggttcaagtgatacttgtgcttcaacctcctgagtagctgggactacaggcacttgtcaccatgctcagctaatttttgtattttttagtagaaatgaggttttgccatgttggacaggctggtctccaactcctggcctcaaatgatctgcctgccttggcctcccaaagtgttaggattacaggcatgagtttttccaatagattttagttataagacaactaagcttttattaaaattttattattcttctaaacaccatcttgcagcaactgaatgagataggtactgatattatccttgttctatggacaaaaaagctaaggtttaaagatattaagtagtttgtctaagtttacattatcagtgagcaattgagccagattttgaatatggccagtcttacactagcatctagagtcttaaccactatgttgtttaacagcattacctaatgcattatttcctttacagaaaggcaaacttttacatggataggacacacaattgtacatttcagatagctcatatatgctaaaagcttactgaacaagtatttctgtattgttatctttgactttctatatcattgttcttactgtgaatcccacgttactgagcacaaagttgacagtaatacatattaatagctcacctctttttaattaaaattcatcttttcttcatcgtaa

SEQ ID NO: 73 - DNA, 1513 bp, Homo sapiens
aggaggaggcagtggccaggaaggcacaggcctgagaagtctgcggctgagctgggagcaaatcccccaccccctacctgggggacagggcaagtgagacctggtgagggtggctcagcaggcagggaaggagaggtgtctgtgcgtcctgcacccacatctttctctgtcccctccttgccctgtctggaggctgctagactcctatcttctgaattctatagtgcctgggtctcagcgcagtgccgatggtggcccgtccttgtggttcctctctacctggggaaataaggtgcagcggccatggctacagcaagacccccctggatgtgggtgctctgtgctctgatcacagccttgcttctgggggtcacagagcatgttctcgccaacaatgatgtttcctgtgaccacccctctaacaccgtgccctctgggagcaaccaggacctgggagctggggccggggaagacgcccggtcggatgacagcagcagccgcatcatcaatggatccgactgcgatatgcacacccagccgtggcaggccgcgctgttgctaaggcccaaccagctctactgcggggcggtgttggtgcatccacagtggctgctcacggccgcccactgcaggaagaaagttttcagagtccgtctcggccactactccctgtcaccagtttatgaatctgggcagcagatgttccagggggtcaaatccatcccccaccctggctactcccaccctggccactctaacgacctcatgctcatcaaactgaacagaagaattcgtcccactaaagatgtcagacccatcaacgtctcctctcattgtccctctgctgggacaaagtgcttggtgtctggctgggggacaaccaagagcccccaagtgcacttccctaaggtcctccagtgcttgaatatcagcgtgctaagtcagaaaaggtgcgaggatgcttacccgagacagatagatgacaccatgttctgcgccggtgacaaagcaggtagagactcctgccagggtgattctggggggcctgtggtctgcaatggctccctgcagggactcgtgtcctggggagattacccttgtgcccggcccaacagaccgggtgtctacacgaacctctgcaagttcaccaagtggatccaggaaaccatccaggccaactcctgagtcatcccaggactcagcacaccggcatccccacctgctgcagggacagccctgacactcctttcagaccctcattccttcccagagatgttgagaatgttcatctctccagcccctgaccccatgtctcctggactcagggtctgcttcccccacattgggctgaccgtgtctctctagttgaaccctgggaacaatttccaaaactgtccagggcgggggttgcgtctcaatctccctggggcactttcatcctcaagctcagggcccatcccttctctgcagctctgacccaaatttagtcccagaaataaactgagaagtggaa

SEQ ID NO: 74 - DNA, 1555 bp, Homo sapiens
agtggtgtttgctttctccaccagaagggcacactttcatctaatttggggtatcactgagctgaagacaaagagaagggggagaaaacctagcagaccaccatgtgctatgggaagtgtgcacgatgcatcggacattctctggtggggctcgccctcctgtgcatcgcggctaatattttgctttactttcccaatggggaaacaaagtatgcctccgaaaaccacctcagccgcttcgtgtggttcttttctggcatcgtaggaggtggcctgctgatgctcctgccagcatttgtcttcattgggctggaacaggatgactgctgtggctgctgtggccatgaaaactgtggcaaacgatgtgcgatgctttcttctgtattggctgctctcattggaattgcaggatctggctactgtgtcattgtggcagcccttggcttagcagaaggaccactatgtcttgattccctcggccagtggaactacacctttgccagcactgagggccagtaccttctggatacctccacatggtccgagtgcactgaacccaagcacattgtggaatggaatgtatctctgttttctatcctcttggctcttggtggaattgaattcatcttgtgtcttattcaagtaataaatggagtgcttggaggcatatgtggcttttgctgctctcaccaacagcaatatgactgctaaaagaaccaacccaggacagagccacaatcttcctctatttcattgtaatttatatatttcacttgtattcatttgtaaaactttgtattagtgtaacatactccccacagtctacttttacaaacgcctgtaaagactggcatcttcacaggatgtcagtgtttaaatttagtaaacttcttttttgtttgtttatttgtttttgtttttttttaaggaatgaggaaacaaaccaccctctgggggtaatttacagactgagtgacagtactcagtatatctgagataaactctataatgttttggataaaaataacattccaatcactattgtatatatgtgcatgtattttttaaattaaagatgtctagttgctttttataagaccaagaaggagaaaatccgacaacctggaaagatttttgttttcactgcttgtatgatgtttcccattcatacacctataaatctctaacaagaggccctttgaactgccttgtgttctgtgagaaacaaatatttacttagagtggaaggactgattgagaatgttccaatccaaatgaatgcatcacaacttacaatgctgctcattgttgtgagtactatgagattcaaatttttctaacatatggaaagccttttgtcctccaaagatgagtactagggatcatgtgtttaaaaaaagaaaggctacgatgactgggcaagaagaaagatgggaaactgaataaagcagttgatcagcatcattggaacatggggacgagtgacggcaggaggaccacgaggaaataccctcaaaactaacttgtttacaacaaaataaagtattcactacca

SEQ ID NO: 75 - DNA, 3447 bp, Homo sapiens
agagcgccctgctcctccttcagctgctggcgtcgccgcgcggggagaaagaagccgtccctccggcgctgggagagctgcagagccgcgggcagagaaggaggccgcggccgagcccggcagcccgataccccccatccgagcgaccccctttggggcaggcggagaaggtggcataggcgaccaggagggttcgcccacctgggacacgcacccacagtcacctccaaaggaccccccctccccaagtctctaggagctgctccttcatcactggagtcgcccctacctctctgcccccagcccgagagccccaggcggggacccccggatcggacgtccccaagcctccgggcacctggctcagcaggaggcccccggctcggggcagggcagggccggcggcggcgagccggagcccgccccctgcccgggccccgccgagccctcggagcccacccatggggcacctgccccttgcgcctccttgcccggccgcgcccagcccggcgtcccgagcagcgcaggggaggatccccgcgcagtgacccgggagccaccacagactctgggaggctcggcggctggagcagcaggcagctccccgcagctcccggcgcttccaggcagctctctgagccgtgccagaggcccggcccgccattcccagccccgagccatgatgaagactttgtccagcgggaactgcacgctcagtgtgcccgccaaaaactcataccgcatggtggtgctgggtgcctctcgggtgggcaagagctccatcgtgtctcgcttcctcaatggccgctttgaggaccagtacacacccaccatcgaggacttccaccgtaaggtatacaacatccgcggcgacatgtaccagctcgacatcctggatacctctggcaaccaccccttccccgccatgcgcaggctgtccatcctcacaggggatgtcttcatcctggtgttcagcctggataaccgggagtccttcgatgaggtcaagcgccttcagaagcagatcctggaggtcaagtcctgcctgaagaacaagaccaaggaggcggcggagctgcccatggtcatctgtggcaacaagaacgaccacggcgagctgtgccgccaggtgcccaccaccgaggccgagctgctggtgtcgggcgacgagaactgcgcctacttcgaggtgtcggccaagaagaacaccaacgtggacgagatgttctacgtgctcttcagcatggccaagctgccacacgagatgagccccgccctgcatcgcaagatctccgtgcagtacggtgacgccttccaccccaggcccttctgcatgcgccgcgtcaaggagatggacgcctatggcatggtctcgcccttcgcccgccgccccagcgtcaacagtgacctcaagtacatcaaggccaaggtccttcgggaaggccaggcccgtgagagggacaagtgcaccatccagtgagcgagggatgctggggcggggcttggccagtgccttcagggaggtggccccagatgcccactgtgcgcatctccccaccgaggccccggcagcagtcttgttcacagaccttaggcaccagactggaggcccccgggcgctggcctccgcacattcgtctgccttctcacagctttcctgagtccgcttgtccacagctccttggtggtttcatctcctctgtgggaggacacatctctgcagcctcaagagttaggcagagactcaagttacaccttcctctcctggggttggaagaaatgttgatgccagaggggtgaggattgctgcgtcatatggagcctcctgggacaagcctcaggatgaaaaggacacagaaggccagatgagaaaggtctcctctctcctggcataacacccagcttggtttgggtggcagctgggagaacttctctcccagccctgcaactcttacgctctggttcagctgcctctgcaccccctcccacccccagcacacacacaagttggcccccagctgcgcctgacattgagccagtggactctgtgtctgaagggggcgtggccacacctcctagaccacgcccaccacttagaccacgcccacctcctgaccgcgttcctcagcctcctctcctaggtccctccgcccgacagttgtgctttgttgtggttgcagctgttttcgtgtcatgtatagtagtagaaatggaaatcattgtactgtaaaagcctagtgactccctccttggccaggccctcacccagttcagatccacggcctccacccgggacgccttcctcctctgctcccaaacagggtttccgtggcctgtttgcagctagacattgacctccgccattgagctccacggtttacagacaattgcacaagcgtggggtgggcaggccaggactgcttttttttaatgctcccatttcacagaggataccaccgagactcggaggggacacgatgagcaccaggccccacctttgtcccctagcaaattcagggtacagctccacctagaaccaggctgccctctactgtgctcgttcctcaagcatttattaagcacctactgggtgctgggttcactgtgtcctaggaaaccaagagggtccccagtcctggcctctgcccgcccctgctgccccaccaccttctgcacacacagcggtggggaggcggggaggagcagctgggacccagaactgagcctgggagggatccgacagaaaagctcagggcgggtcttctccttgtgcccgggattgggctatgctgggtaccaccatgtactcaggcatggtgggttttgaacccataaaccaaaggcccttgtcatcagctcttaacaagtatattttgtattttaatctctctaaacatattgaagttttagggccctaaggaaccttagtgatcttctattgggtctttctgaggttcagagagggtaagtaacttcctccaggtcacacagcaagtctgtgggtggcagaagcaagctagcgctgggcattcagtacataccacgatgtgctccctctcttgatgcttggcccctggggccttcagggctttgggacatcttgtcctcaaccctctccctagatcagtctgtgagggtccctgtagatattgtgtacaccatgcccatgtatatacaagtacacacagatgtacacacagatgtacacatgctccagccccagctctgcatacctgcacctgcaccccagccttggcccctgcctgcgtctgtgctcaaagcagcagctccaaccctgcctctgtccccttccccacccactgcctgagccttctgagcagaccaggtaccttggctgcaccggtgtgtggcccgctctcacccaggcacagccccgccaccatggatctccgtgtacactatcaataaaagtgggtttgttacaaa

SEQ ID NO: 76 - DNA, 9287 bp, Homo sapiens
gggttcggagcgcgaagccgccgctgggtcctcggcgcgccccgcgtctgcgcttgctgccgcgccccggtcggcgcgctgggagttccagccatgctcttctggcacacgcagcccgagcactacaaccagcacaactccggcagctacctgcgtgatgtgctcgctctgcccatcttcaagcaggaggaaccccagctgtcccccgagaacgaggcccgcctgccacccctgcaatatgtgttgtgtgctgccacgtccccagccgtgaagctgcatgaagagacgctgacctacctcaaccaaggtcagtcttatgaaatccgactactggagaatcggaagctgggagactttcaagatctgaacacaaaatatgtcaagagcatcatccgtgtggtcttccatgaccgccggctgcagtatacggagcaccagcagctggagggctggcggtggagtcggccaggggaccggatcctggacatcgatattccactgtctgttggtatcttggaccccagggccagcccgacccagctgaatgcagtcgagtttttgtgggaccctgcgaagagagcttctgcattcattcaggtacactgcatcagcacagaattcacccccaggaagcacgggggcgagaagggagtgccctttcgagtccagattgacacgtttaagcagaacgagaatggggagtacacggagcacctgcactcagccagctgccagatcaaggtgttcaagccgaagggagccgatcggaaacagaagactgaccgggagaagatggagaaaagaactgcccaagagaaggagaaataccagccgtcctatgaaaccaccatcctcacagagtgctctccatggcccgacgtggcctaccaggtgaacagcgccccgtccccaagctacaatggttctccaaacagctttggcctcggcgaaggcaacgcctctccgacccacccggtggaggccctgcccgtgggcagtgaccacctgctcccatcagcttcgatccaggatgcccagcagtggcttcaccgcaacaggttctcgcagttctgccggctctttgccagcttctcaggtgctgacttgctgaagatgtcccgagatgatttggtccagatctgtggtcccgcagatgggatccggctcttcaacgccatcaaaggccggaatgtgaggccaaagatgaccatttatgtctgtcaggagctggagcagaatcgagtgcccctgcagcagaagcgggacggcagtggagacagcaacctgtctgtgtaccacgccatcttcctggaagagctgaccaccttggagctgattgagaagatcgccaacctgtacagcatctccccccagcacatccaccgagtctaccggcagggccccacgggcatccatgtggtggtgagcaacgagatggtgcagaacttccaagatgaatcctgttttgtcctcagcacaattaaagctgagagcaatgatggctaccacatcatcctgaaatgtggactctgagcagcagtggacctcatacctgtctccagctcccagccctgtggatccccgtggatgtagacattgccccactgtaagctgtggcctcaccaggcaagctgaggccaggagggaccctgcccagtctgtgaaagctacagagcaccaaccagcagaagcctgtggacaccaagtacggtgtacagaaagccagtggctcctttctcccttcctcttggcctccagattttgaatggttccttgttcttttctattggtccaaccctgacgttctaaaagggcaaacagtggagacgtctgctctgaaatccctcatcccttagttggaagctgattgggtatcttggtgctgcctgtattggtcccttctgaccactctcctgcctccagagaaagctctgcttcaccctggaagctggtacctttacctcctcctctgggagttggctgcatggccagcactgccgacttgatgggagcagtttgccctcattctcctgtttcaggtttgcttcccttctcagtgaccctggtgagcatccgcctttcctgttcttggatgaattgatgggagtggggctattctgtgccttctacctctttcttctctacgttgtttctaaggatctgctgctgcggaacccaaagatgtgctcctgtctctgcactggcgcattggcatggtagatgccacaatgtatgtgcacggcctttctcagagacattagttctgaggccctttgtggggaggttagggggatggtaatagaaaaagactattttatttcctggcaatcacgggtaaggaggattaggaatgagtattccattcctaggtgtcatcagatgaccttgaccaccacaataccaggccctcttggatggacttatagaaagttagagaagaccttgttgaaccgctgctaaacttgccacaggagcgatgtgttttctctgagtgcccctcacttacatgtttatctttgtttgtagaggctatgtttaggatattttgcctgcatcagaatgggtgcatcatctttcttaatggcctaactatcgggaaatttgagtgtcagtaactgtggtagactcagaaattcgtctttgtcttgcctctggttcctgggatccagtgatctctactggcccagggcttcagctcttggttaatttaggttcatggggaaccctctgaccacctgaatgggatgtcatagcttctaaatggagcttctgtggaatgaagtgctagactgaaggactaccagaataaaacagggtctacaatggggagaacttgttttatagatgaggaaaccaaggctcagaggggcaaagtcacctgcatggtagcacatagtgatagggtagcgatataaatttatcatataaaccaggacatctcggaataaaaggggctctgttagtcattatgttgggtaatagccgtggcattcctacagaacagagtgaggacaggctcctgattcctcttccttctttagaggagaagcggggagtgggttaactaacagctttattgagatgtcattcacatgccattcagtttacccattgctagtgtccaattgtattcacagaaccaccatcaattcacagaattacagtcaacgttggtacattttcatcacccccagtaaaaccccgtacccttggtctgtcactcctgctttcctaactcctgcagtccaaggcagccatgaatctactttctatgtaagattaacctactctggacatttcatatatctggaatcatgtgatatctcttttgtgactggcttcttccactgaatgttttctagggccgtccaagttgaggatgtatcagtacttcattcttttgtattgctgaataatacttcattgtatagatagaccacatttgtttattgattcatcagttgatggacatttgtgtgtttttactttttggctactctgaatgatgctgctatgaacatatttctacaagattttgtgtggacatatgttttcatttcttttagcaatatacataggagtggaattgctaggtcttacagtaactccgtgttttaactttttgagaaactgccagactgttttctatagcagctgtaccattttacattcccaccagcaatgtatccaggtttcaatttgtctacatcctcatcaacacttgctattatctgtctttttgcttttagcatcctaatgagtatgaaatgctatcttgtggttttgatttgcattcccctgatggcaactgatgctgagtgtcttttcctgtgcttacgggccatgcgtatttctttggagaaaggtctatccaggtcctttgcctatttttaattgagttgtctttttttttttaagttttctgttttcctaaccactagactaccagggatgagccttctttttattattgagttgggtgagctatttgtatattctagacgccagtcttttatcaggtatatgactggtaaaaatgttctccccttctgtggattgttttcagtttcttgttggtgtcctttgagacacaaaactttttaactttgatgatttccaagatacgtattttttttctattgtcacttgtgcttttggtgccatatctagaaaaccattgcctaatccaaggtcaagaagattaatgcctgtgttttcttctaagaactatacttttagttctcacaatggtctttgatccatttcgagtatatttttatatatgatgtgatgtaggggtccagcttcattcttttgcttgtggatctccacttgtcccactgctgattattgagaaaaatatcctttctccacggaattgtcttggcatccttgctaaaggcctctgcttcttactggatcttctttcctgggacatggtgtcgttgggaagcttaccttttttttttttttacttagtctgtgtttggttccaccagttttatgctgcctttctactctgttcttgctgtctccctctttacctgagtcaacggtactgagtcctatctctctctgatgttccccagtcttccttggtgcatgttctagctccacacactagtccttggaggaaggttgagaccaatgatttcctgttatgagtcatgaggaaactgaatcacctagaagtggaataatgtgctcagggtcaccatagcccattagtggaaggaccaggactagacctttagtcttctgaggtccagccccttaggctgtctgtcatcactgtacccaagtgatgtcactaccaaggccaaatgatggtgggctaaattttaattctcaaaagtgtaggaggctaatattgtcttctaagttccaaaagaagatgtaataaaagtctgttaccttaagtgtgctattagtagagtcttccatttttctggcatgcccctggcatctgctcttcttaccttctcgtggttgtagttaaagcttatagcttatgaaagaatagaaaataataaataccaaaaaaaagtacacatggtaatttggtaccaaaatatctcagctgcctaatttagcagctcatcccttccacaggggtcagatgagctaaagctccaggttttatttttcatttgattgacatacagaaaagccatagcccttcccacagctgtccagggtctttcctgtgagtccggaggtgctggcctattgagcaggacagctcttcccagggcattcccaccaacctgtggcttctgaactgtagcttctttttacagtgaaccccagagggaaataagacagacacatgtgctcaggccaccatcttgaactggaagcccaaagctgagttccttactcttaggtcgtcacggtttttgcggggtatctgcaaggttgagataaaccctttcctgtttaccaggttgtcctttctggatgaagggacagaggctgttgaatggaggaataataggtttgctggaggaggggcatggtatgcctgtggaaaggacaggatggggtggggaggtcgaggctttgacttggggtcctaaacaaaggtcaggtgttgccctagtgacctcttgcccagacagcccagagccccttacacagagctattaacctagggaaggctttaccagcagtggactggagccagccagggtcacaagtttccaagtccagcattgcttcaggggctggcctgagtaactgaagatctgaaaatcattaacaagtcgatgaaataaacggaaaagcctcttaggctgttgtcagtggagcagagggagaaagtccctaggcgctcagagggggtgagaaagcagtggatgattgggcgggggtgggggattagatgttgacactgcctggggtgtaggaagaggaacagagaacccagagtcagggtcctagatcccagaccctcgctcagtatgagtctctttgcctctctgggtctctatctcctcctcttacaaatacaggcttggtgatctctgaagatggcaccaacctgccatgaaatgaatctgaggggttttcccatttttccctccatcaaaatcgtacaaaaagctggacgtggtggcccatgcctctaatcctagcattttgggaggccgaggtgggagaatcacttgacgccaagagttcgagaccagcctgggcatcgtagtgagactccatctctgtctttttgaaaataaaaaatctttgaaaattgcacaacaggcaggagacctttacgtgtgcccatcctggttgtacacagtgccaccagtgctcctgcagtgcaaggcggcatgcttcttgacatgggtcagattgtgtccatcgtgtctttgggaatcagccctagctcctaactgggctgactacttcctccgcaaacttatgggggctcccagatattccttgccagccaggggccagacacagtgcaggcacagtctgtgtcattggtgcacatgtgcgtgtttacatgtgtacctgggttccttcccttgcccatgaatttgccatgagcacagccagaagcagcctcagcttggcaaggtgtggagatgactgctgttcccttcgcatttggggaaaacaggctccctcggtagctcgatgatcctcttttgatcttgtgtgacctcctggagagtggatgaagctggtggccttagcttttctagacagtgtaagtggcactgggcaaggcccccagagcagggcaaggtctctagagcgggtctcccacatgactggcttcacacaggcacttccgctcgggttgcatgctctgtgtcatcttaccggtccagggttgcaggtaggaaatgtttgtaccctcttctgattgccacctccttcccatcgccccttagggacagggcttgagggccagtgaggcgctggtcaggcaccccaggcctccttgggacctgcccaggggcaccctgagagctcctgaaacccccacttagcttccagacctttctgcaaaagctcctcctggctttcctccctcccccaatctatgggtcacagctaacagatctgagggcaactgctgtgctagtggccagggctgcacctgccatccccggctctgccactttagggccttctagaggcagtgtccttaggaagtagctctgaggcatgggttttctgctcctgtgcagggcagctgatgggataaggtggggaaggacggtcagtgcttgggccccagctggccagcctggcgatggggaaaccaaaccatgtcccccagcgaagggccagagtgggaacctgtcctcatgcccttcgtcctgaggagccctgaggtgggcagcaggggccaggggaagttttcaggccttcatcaaagagaacaacatcctcagctccgcacccctcatcctgtatcagcacttaccggtgtgtgactgcccttgtcagctagcatacggtgggcccacctggcccactggctgtttatgccactgatttatgatagggaatattatctttgaacccaatgaagtgttttctcccccatcacaaaaaaaaaaattcttatttttagtagacatgtatttaccaaaaatatgtactcaattattgtattttggattttatcaatttaaaaattgtggaaatttgtttgctcttacgccaacataatattgattttgcctcttggctctgaaagcccaaaatatttaccgtctagcccgttacagaaaaagtctgctgactactgagccagacctccattacctccatccctgttggattatttaaagaaagcctcagacagtaagggcttttttaaaagaataaaatgacttggtttgcgcttggaagcaggggaagcattcagatgagcggtttctgcattaaccctgcctatcacgcatctcgtgtcctgtgtggctggcgagccccccttggaaggttctggtgcttcagctggctcctgcagagtccaccccgcctcgtggtgggaatgcagagccctttgctttccttcttgccgcctgcttcctgttcctggggacccgctgggcctttggtctgcatcccctggccaggtccctcagggttgatgcgtggagaaggactttgagcagtggtgggcagcagtggcctcctggccagctcacactcttgtcctgggaggggcagcctgatctcacctccacctagtaccttggggactgaggaccttttggcttctctggagcctgcaagcctcttcccatgtgtccagctgctcttcctgctacaaaggggactgctcacagtggcctcagcttggtggttttgaggggccgccccccggccctccataagggtatcctgggcctgagaattctgcatctgccattggaggatggacagcctcaaatggaaggagtcccacgggagatgggtccgaggtccggctgtggccatccagccccctgtggcttgtccagcctctgtgcacccctggtgtcttcactccaggggcagacagcagccactgcagttcctttcttcgtgagtaacagtagtgatagcagctggggctaacaggctaggctttgtgttctgcgcatttggtcagcttctcactcgatcctccctaaagcaatggggaggcccccactagcccagttttcaggaagtcaactgggaggttagatgggggccagggtcccacagctactgatggcccgagccaggttgagcttcctggtgtccagtccggatcccacttgcagatctcatgctctcagataggtgggacaagttcttttgtcacagtgctggctctgtcctgaggcctcattgctggctgggtgtgctctgctgggaaaagctttgcggggcttgcttggttaaccacagaagagaaggggactgtttggggtgcctctctgcagcctccccgtgctgggtggaagcacggttactgtgttctctaatgttcatgtatttaaaatgatttctttctaaagatgtaacctccacacctttctccagattgggtgactcttttctaaaggtggtgggagtatctgtcggggtggtgtggcccttggatgggtcaggtgggtgtgagaggtcctggggaggtgggcgttgagctcaaagttgtcctactgccatgtttttgtacctgaaataaagcatattttgcacttgttactgtaccatagtgcggacgagaagtctgtatgtgggatctgtgcttgggttagaatgcaaataaaactcacatttgtaagaaa

SEQ ID NO: 77 - DNA, 2228 bp, Homo sapiens
aactagcacgtggctcccgcccccagactgcttctttattcattcctaacctttaccttggcagatgaaatataagattcatcaaccacatttgacagcccatggcaggtttcctgttttccatcgtccctctgcaggtcacagacacacagagcccagccgtggcaggctcagccggggtccggggctgctaacaacggctacattcctcccccagggccaagggaaatcctgagcgcaggccagggttgtttggttttgaggtgtgctgggatgaaaggcaccctggaagtggaaggtaaatgaacaatggaaaaacttcacggcaagattagaaagatacctgagcccaatacccgcctgatgtcgtgggccacacctccgggttaccaggggaagggaggaagcaaactgtcatattgatgtggctctaaacaacaacagtgtgcgaaggcccaggggcactttgggattgaccaagaggaaacacaagttgcacaatgatacaatcttgttggtacaattgtcagagaagggaactcccacagcaaaggccataaaaccatccagggcagtctggggcggctcagttctgcggtgccagggagtggagcagagctcagccccgtcccaaacacagatgggaccatgaactccggacacagcttcagccagaccccctcggcctccttccatggcgccggaggtggctggggccggcccaggagcttccccagggctcccaccgtccatggcggtgcggggggagcccgcatctccctgtccttcaccacgcggagctgcccaccccctggagggtcttggggttctggaagaagcagccccctactaggcggaaatgggaaggccaccatgcagaatctcaacgaccgcctggcctcctacctggagaaggttcgcgccctggaggaggccaacatgaagctggaaagccgcatcctgaaatggcaccagcagagagatcctggcagtaagaaagattattcccagtatgaggaaaacatcacacacctgcaggagcagatagtggatggtaagatgaccaatgctcagattattcttctcattgacaatgccaggatggcagtggatgacttcaacctcaagtatgaaaatgaacactcctttaagaaagacttggaaattgaagtcgagggcctccgaaggaccttagacaacctgaccattgtcacaacagacctagaacaggaggtggaaggaatgaggaaagagctcattctcatgaagaagcaccatgagcaggaaatggagaagcatcatgtgccaagtgacttcaatgtcaatgtgaaggtggatacaggtcccagggaagatctgattaaggtcctggaggatatgagacaagaatatgagcttataataaagaagaagcatcgagacttggacacttggtataaagaacagtctgcagccatgtcccaggaggcagccagtccagccactgtgcagagcagacaaggtgacatccacgaactgaagcgcacattccaggccctggagattgacctgcagacacagtacagcacgaaatctgctttggaaaacatgttatccgagacccagtctcggtactcctgcaagctccaggacatgcaagagatcatctcccactatgaggaggaactgacgcagctacgccatgaactggagcggcagaacaatgaataccaagtgctgctgggcatcaaaacccacctggagaaggaaatcaccacgtaccgacggctcctggagggagagagtgaagggacacgggaagaatcaaagtcgagcatgaaagtgtctgcaactccaaagatcaaggccataacccaggagaccatcaacggaagattagttctttgtcaagtgaatgaaatccaaaagcacgcatgagaccaatgaaagtttccgcctgttgtaaaatctattttcccccaaggaaagtccttgcacagacaccagtgagtgagttctaaaagatacccttggaattatcagactcagaaacttttattttttttttctgtaacagtctcaccagacttctcataatgctcttaatatattgcacttttctaatcaaagtgcgagtttatgagggtaaagctctactttcctactgcagccttcagattctcatcattttgcatctattttgtagccaataaaactccgcactagctgcaaaaaaaaaaaaaaaaaaa

SEQ ID NO: 78 - DNA, 1144 bp, Homo sapiens
actaacctgctctgaagtgagccaggcagctctggccatcttttcccagccacagaatcaggtgatggtccagaattaagagctgtcacctgtgtcattcactcacaatggaagaaatgaagaagactgccatccggctgcccaaaggcaaacagaagcctataaagacggaatggaattcccggtgtgtccttttcacctacttccaaggggacatcagcagcgtagtggatgaacacttctccagagctctgagcaatatcaagagcccccaggaattgaccccctcgagtcagagtgaaggtgtgatgctgaaaaacgatgatagcatgtctccaaatcagtggcgttactcgtctccatggacaaagccacaaccagaagtacctgtcacaaaccgtgccgccaactgcaacttgcatgtgcctggtcccatggctgtgaatcagttctcaccgtccctggctaggagggcctctgttcggcctggggagctgtggcatttctcctccctggcgggcaccagctccttagagcctggctactctcatcccttccccgctcggcacctggttccagagccccagcctgatgggaaacgtgagcctctcctaagtctcctccagcaagacagatgcctagcccgtcctcaggaatctgccgccagggagaatggcaaccctggccagatagctggaagcacagggttgctcttcaacctgcctcccggctcagttcactataagaaactatatgtatctcgtggatctgccagtaccagccttccaaatgaaactctttcagagttagagacacctgggaaatactcacttacaccaccaaaccactggggccacccacatcgatacctgcagcatctttagtcaagttggaggagaaagacaacacttggtctaagacacggcagcaagacatccctgcatattgttccagataaaaatgaaagctgctcacacccacttgcctccccaatctgttaaacagcttcgtgtctagtatgagctcagtacttgccctgtgaaaatcccagaagcccccgctgtcaatgttccccatccacaccctgcttgctcctgtgtaacagctcagatgatgaataataataaaactgtacttttttgga

SEQ ID NO: 79 - DNA, 1921 bp, Homo sapiens
ctgcctcccccccgctcccgctcccctgagcccagccagaccccgcgccgcccgcgccccgctcgactccggaggctcccgcagccccggcgtccgccccgctgccccctcccccgggggccatgggggcgcccccgggctaccggccctcagcttgggtgcatctcctccaccagctgccccgcgccgacttccagctccgcccggtgcccagcgttttcgcgccccaagagcaggaataccagcaggccttgttgctggtggcggccttggcgggcctgggcttgggcctgagcctcattttcatcgctgtctacctcatccgcttctgctgctgccggccccccgagccccccgggtccaagatcccctcgcccgggggaggctgcgtcacctggagctgcattgtcgcccttctcgccggctgcactggcattggcatcggtttctatggcaacagtgagaccagtgatggggtgtcccagctcagctctgcgctgctgcacgccaaccacacactcagcaccattgaccacctggtgttggagacggtggagaggctgggcgaggcggtgaggacagagctgaccaccctggaggaggtgctcgagccgcgcacggagctggtggctgccgcccgaggggctcgacggcaggcggaggctgcggcccagcagctgcaggggctggccttctggcagggagtgcccctgagccccctgcaggtggctgaaaatgtgtcctttgtggaggagtacaggtggctggcctacgtcctcctgctgctcctggagctgctggtctgcctcttcaccctcctgggcctggcgaagcagagcaagtggctggtgatcgtgatgacagtcatgagtctcctggttctcgtcctgagctggggctccatgggcctggaggcagccacggccgtgggcctcagtgacttctgctccaatccagacccttatgttctgaacctgacccaggaggagacagggctcagctcagacatcctgagctattatctcctctgcaaccgggccgtctccaaccccttccaacagaggctgactctgtcccagcgagctctggccaacatccactcccagctgctgggcctggagcgagaagctgtgcctcagttcccttcagcgcagaagcctctgctgtccttggaggagactctgaatgtgacagaaggaaatttccaccagttggtggcactgctacactgccgcagcctgcacaaggactatggtgcagccctgcggggcctgtgcgaagacgccctggaaggcctgctcttcctgctactcttctccctgctgtctgcaggagcgctggccactgccctctgcagcctgccccgagcctgggccctcttcccacccagtgacgactacgatgacacagacgatgacgaccctttcaaccctcaggaatccaagcgctttgtgcagtggcagtcgtctatctgagcccctcctcccggctggactggagcctggctcccctcttcgttccttccctggctgccggaggagaccccactaacccagcctgcctgggctctgaccactaacactcttggccatggacagcctgcacaggaccgcctccctgctcttggccactgtgctcccatttctgtccttggccttgggagtagctgagggggcagactagggagtagggctggcaggggagggggcagacagcctcgcctcgcacccttcatccctggctgccggtcccatccttggagggactaagctgggggtgggggacatgagtccccctgctgcccctgccacatcccagtgggctctgaccccctgatctcaactcgtggcactaacttggaaaagggttgatttaaaataaaagggaagactattttacaagcaaaaaaaaaaaaaaaaaa

SEQ ID NO: 80 - DNA, 1881 bp, Homo sapiens
agtgccctccccgctccgcggcgccggctgcgaagttgagcgaaaagtttgaggccggagggagcgaggccggggagtccgctccagcggggcgctccagtccctcagacgtgggctgagcttgggacgagctgcgttccgccccaggccactgtagggaacggcggtggcgcctccccagcaaaccggaccgactgggtccagccgccgcagggaatgacgccggtgctcctgcagccacggctccgggcggggaaggcgagccccacagccggccctgcgacgcccgcctgggcagcaccgataaggagctgaaggcaggagccgccgccacgggcagcgcccccacagcgccagggaccccctggcagcgggagccgcgggtcgaggttatggatccagtggtcggttgcggacgtggcctctttggttttgttttctcagcgggcggcccccggggcgtgctcccgcggccctgccgcgtgctggtgctgctgaacccgcgcggcggcaagggcaaggccttgcagctcttccggagtcacgtgcagccccttttggctgaggctgaaatctccttcacgctgatgctcactgagcggcggaaccacgcgcgggagctggtgcggtcggaggagctgggccgctgggacgctctggtggtcatgtctggagacgggctgatgcacgaggtggtgaacgggctcatggagcggcctgactgggagaccgccatccagaagcccctgtgtagcctcccagcaggctctggcaacgcgctggcagcttccttgaaccattatgctggctatgagcaggtcaccaatgaagacctcctgaccaactgcacgctattgctgtgccgccggctgctgtcacccatgaacctgctgtctctgcacacggcttcggggctgcgcctcttctctgtgctcagcctggcctggggcttcattgctgatgtggacctagagagtgagaagtatcggcgtctgggggagatgcgcttcactctgggcaccttcctgcgtctggcagccctgcgcacctaccgcggccgactggcctacctccctgtaggaagagtgggttccaagacacctgcctcccccgttgtggtccagcagggcccggtagatgcacaccttgtgccactggaggagccagtgccctctcactggacagtggtgcccgacgaggactttgtgctagtcctggcactgctgcactcgcacctgggcagtgagatgtttgctgcacccatgggccgctgtgcagctggcgtcatgcatctgttctacgtgcgggcgggagtgtctcgtgccatgctgctgcgcctcttcctggccatggagaagggcaggcatatggagtatgaatgcccctacttggtatatgtgcccgtggtcgccttccgcttggagcccaaggatgggaaaggtgtgtttgcagtggatggggaattgatggttagcgaggccgtgcagggccaggtgcacccaaactacttctggatggtcagcggttgcgtggagcccccgcccagctggaagccccagcagatgccaccgccagaagagcccttatgacccctgggccgcgctgtgccttagtgtctacttgcaggacccttcctccttccctagggctgcagggcctgtccacagctcctgtgggggtggaggagactcctctggagaagggtgagaaggtggaggctatgctttggggggacaggccagaatgaagtcctgggtcaggagcccagctggctgggcccagctgcctatgtaaggccttctagtttgttctgagacccccaccccacgaaccaaatccaaataaagtgacattcccagcctgaaaaaaaaaaaaaaaaaa

SEQ ID NO: 81 - DNA, 8492 bp, Homo sapiens
agtgcggggcgggcgcgcctaggctgccgcccagcgccctcgccgcggccatgcccgggccctagagcgcctgccgcagcttgcgccccgcagccccgcagccccgcgcccgccgccgcctcttcaatgggcaacctgctcggcggggtcagcttccgcgagcccaccaccgtggaggactgcgactccacctggcagaccgactcggagcccgagcccgaagaaccagggccgggcggcggcagcgagggcccggggcaggagtccgagcagcccgcgcagcccccggagcaagccggcgggcggcccggcgccagccccgcgccggacgaggacgccgaggcggcgggcgccgagcagggtggtgattccactgaagcaactgccaaaccaaagagaagtttttatgctgccagggatttgtacaagtaccgacaccagtacccaaacttcaaagatatccgatatcaaaatgacttgagcaatcttcgtttttataagaataaaattccattcaagccagatggtgtttacattgaagaagttctaagtaaatggaaaggagattatgaaaaactggagcacaaccacacttacattcaatggcttttccccctgagagaacaaggcttgaacttctatgccaaagaactaactacatatgaaattgaggaattcaaaaaaacaaaagaagcaattagaagattcctcctggcttataaaatgatgctagaattttttggaataaaactgactgataaaactggaaatgttgctcgggctgttaactggcaggaaagatttcagcatctgaatgagtcccagcacaactatttaagaatcactcgtattcttaaaagccttggtgagcttggatatgaaagttttaaatctcctcttgtaaaatttattcttcatgaagctcttgtggagaatactattcccaatattaagcagagtgctctagagtattttgtttatacaattagagacagaagagaaaggagaaagctcctgcggttcgcccagaaacactacacgccttcagagaactttatctggggaccgcctcgaaaagaacagtcggagggaagcaaagcccagaaaatgtcttcccctctcgcctccagtcataacagtcaaacttctatgcacaaaaaagccaaggactccaaaaattcctcctcagctgttcatttaaatagcaaaacagctgaagacaaaaaagtggcaccaaaagagcctgtggaagagacagacaggcccagcccagagcccagcaatgaagctgccaagccaagaaatacagagaaggacagtaatgctgagaacatgaattctcaacctgagaaaacagttactactcccacagaaaaaaaggagagtgtatctcctgagaataacgaagaaggtggaaatgataaccaagacaatgaaaatcctggaaatacaaattgccatgatgttgtactagtacagtgaattatcagaaaacccagaagccagtttaggctagagaggaaaaaactactgtatcatttatcctaaagaacagagatgaggtcaatttcaaattttagccatctgtttgtgatttctgtcataagcattttgttgtttgtttttttattttggatgacaatgaattgaatatctaataaggagatttaagataagacccaataaatgaatgtattctgtaatgcttttaggatgtgaattttcaaattttgtatataataattactttgagaatattttcagagtatctagaaattaccatgtagtatttggtatacaaaatacattcttttgagacattatagtctacatgaaggaaatcaagaggataatttcattggattgctacacttttacctgatttatggctttattttactttattttattttattattattttttgagacggagtctctgttgcccaggctggagtgcagtggcatgatctcggctcactgcaacctctgcctcctggactcaaacgattctcctgcctcagcctcctgagtagctgggattacaggcgtgtgccaccacgcctggctaatttttgtatttttagtagagacggggtttcaccatgttggtcaggctggtctcaaactcctgacctcatgatccacccgcctcggcctcccaaagtgctgggattacaggcatgagccaccatgtctggctgattaattttttttttaactgtaagagtttgatcttttcaaatgtgttcagaaactaatttggattctttgattctagtatctcaacgtgtttatttttagattctgataagtgaaatggatgtccttgtggagctctggcctccccagcttatctatcagtcctgctgtcctcacctccttgcctctttccatgcttacccttaagccaccatctttctcagctagcgtgtgtgtttctagtgtagttggccctccatattcaggggtccagcatctgtggattcaaccaaccgcagattgaaaatatttgttggaaaaaatggatggttacatctctactaaatatgtgcagtccttttatttgtcattattctctaaacaatacagtataacaactattgacatagcatttatattgtatgtattaggtattgtaagtaatttagagatgatttaaagtattttacataagggacttgagcattcctagattttggtaactgcagagggtcctggaaccaaccccctacagatatcaagggaccactatacacattaggatgatctatattgaaatctacatggaacagagtgggacttctaattgtatgacttcaagattttgctttgtttaaattaataactgttttcagaattaagtgcttaaaaacaaatttgattgaaaagttcaagacaagaattttgctctctatggctgttccatataaatttgatggttgattctgaatgtaaatgactgaagaattaaaaaataagaaattcctttttaaaaggcatgcctcttgcactgtgaacaagacagtagtcccttaaaccatgaatatgtcagtgttctatggattacgaaattagtaatgttgcttagcccaaacgtgttttttaaaaagtatagttttgtacatctctaagttatcaaacttcaaaattgagaacaaatttaaaagtccatatatgcaactctagtaagcacttaataggttacatagcactggttaagaacaattaattttgtttctatattattactaattattattacaaatcaaaaaacactgtgataagaacttcaaagcatatatacaaatatagttaaagcaatgaatagatgaaacatgtctactttatttcatttagaaaggaattaacttttttgttaggcttttaagaaaagttctattcattttaatcccctagggaatttgtaatatgtcctacttcatatcatcttctgttgcctctattgatccacattttctgcagtggatttcttgaaaagaatcacacttatagtatgcctctagaaatatgattttactgctttgaagtttacatgaaacatgccagttgcttaactctaattttttatatgaatctcagtagcacttttgttgtacattgtgttccaataagtatagtatggaacactttctcatttttagttcccataatatgccagtttttgctttcctagtgttctgtgagtattaggatttggcaatctgcttttgcatttcaatttctgttttacatgcaagaaaaacatggacactcttacgtggtgcttgtagctgtgtctccgtagagctcagtaaatagttctacagggtttagaggatgagaagcgattgtcaaattaggctgaattgtagaacacaaataatttaattcaaaataacttaccaattttatatacatgataaagtattcagacaactttctaaatgcataatagtaaaagattgtgaccagatattatgatattaataaagttaccagatactaaaatcaatgaatgtaatttgaattacttagaaattgtatattagagcccttatgagtaaaaacatttcatttagcaacttaacttttagaatattcttcctacttagggattttgattagattgtaacattaaattcgagaatatttagtctcaagagaaacacttcctggcatccatcttaaatagtggccttttcccactatggtgtttttaaatgcatattcatatataatagtatgtttcttacatttaatccctaaataacttagataatcattcagtggagaacaagtaaaaggatatcattccttttggagataaacattgagtgtctagaatttttttctattaatgctttgtatattagttttttaaataagatctatagatatgtatttatgtgtgtcttatatatgaaacagtgctctgggtttgactcctatgttttgtaattttaaaaactacgatatgcttgcagaaattcattgagaagctgttataaaaaatgcagtgaagcatgaccaaatagctaaaaatattactgaatctttacaaatatataatctttattgttgtactgtggagtgcaaggatactaaatattggctattgataaaatactaacttgcatttcatggcaaatagatgttatatcgcttgattagtctagaacatttctaatattttgtgctttcatatatcaaaggagattatgtgaaactatttttaaatactgtaaagtgacatatagttataagatatatttctgtacagtagagaaagagtttataacatgaagaatattgtaccattatacattttcattctcgatctcataagaaattcaaaagaataatgatagaggtgaaaatatgtttactttctctaaatcaagcctagttgtcaactcaaaaattatgttgcatagttttattttgaatttaggttttgggactacttttttccagcttcaatgagaaaataaaatctacaactcaggagttactagagaagttctaagtatttttttgctaagtagtaaaaatataaacatatgaaaatgccataatgcctgtcatagtcattgtttcatattttgtcatataaaatcacctaccctgcttctagttttatactttaatctgagtgaaagtatgatgtggtggaaagaaaaaacagtacagtattacatctgagttagtctttgaaaaatcatagtagtaaatgaacctcaacactgagtggtcaaaaattgggttaaccaatggggggagaatatttggttaattgttttaatattaaattttcaagtttataatagagttatggttgagtagtcatccatactgagtaatcacgcattttttaaactataattgaggctcttctaaagctttgttttctaatctaagatacaaaggatattcttgatcttgcttgattgtaactacatctaccagtctttaatgtctgtttggggtgagtggcgatcctctgttgtaggaatgtttttgaagatttctattttgttttccacttaggaaattcccctctctcatttggggtatatgcgttgagtataaggtaggctgtatttagacacactagaatcattaaatgtaggtgaagttgtagagaaaaatggcctgggtcaatgtaggatctagaaaattaggagtgtacatttgctggcttctttttgagttttgtactgtttattacaggaacatatttgtgtggctaatctctagggtgacagtgagtactaccctgctccttctgcattctagttatccaacacacccagcagattgtgttcagggacagaatgtgtttttagaaatcccttattattgaaatgaataataatatagctataaatatgaatgtctggaggtatccagatgtgccttaacaaatgtaaatggttttcattcagaagtttacatttttattacattataaaatctcatcattgggaactttctaaaccatgaatatcagttcttttaatgaaatttaggtggtgctttatcattttggagaagttgctgtttgggacaatagcatcagtttatcaagaagtgtactcaccatgatattcaacaatgtgttacatttgacaaaacgtgtttagagtaagaaagactaactatactgtctgttatatttatttatgctttttgtagtttagctacatactataattttcattttaaacgttccttagttactacaaataatatttatgttttgcttcttcttagatgtaggcggatgcagaaatagaattatgttagagaaattattaaaagtttaattccagtaggcagttggagaaatctgaaactaatttgaaaaacttttatgctgtagtctcattagaatcattttaaaagcactgttcttgcatttttcctagactacagagagtgttctttgtcattttttttcctattctgttgtgaagtttattgtttcagttatttgagggaaataacctcttaatatgtttattttcctgaactaaagttttcatgtagagaatacaattaaatgttttgtgttatgacccaaactggctggaagtagagttcagagagggagaagggacaagaatcagtgtgggcatctcaggaaagtggcgccagtgctgggctccagccttctccactggcatgatgggtcctcagattctcctctggataatgagggtgttgggcactgtgagctctgacttctggggaggataggccatcatggactccatacacaattttgatgggtatcagttctcataaaatacctgctacaatttatttattttgtagttgtttagaaaactgtgagcagttgggcattagtaaattgtagttatatcttaacgatcttgggaatcattgaaatatgagtttttttccctcactcctatttatttaattaaaaaattagggaagttgttcattcacagctgtatattaatataaaatctctttataaaatgattcagagaaaaggcagtagtggtcacttactgtgctaaaatacctttttctctaaaaatatttaagctttagggtttgtcatagttttactttttaaattatactttgtgtaacaatttacgttaactagaaaaattagatatataataagttttggtactaagaaacatttacattctacactcattagtcaaatgaacttttctttcccagtgctaacagattttgtttcatgtgaagaaaaataaaatacaaatgaaataaaagtctagaaacagcaacaggaaactcaccacagaaataaagacataacccttgataagtttgtgtaagtgccagaattattggaagcaggtgacgaatgattaagaaaagctttattgtggggacatgctttaagaatcagctctgtatttgtgccaaggagatcaggtattggtgtgcaaacagatcccattaatactctgatttgaaccatgaattccacctactctgcgttgaagccctccagtagactgatagatgtaatcaaatgatcagctaccaagtttaattcctttgcctgtgtgtagcaacagttggtagttttacaagttaagttgatggtctggctgcagataagagaaagactcagtgataggtggtttgtgagtgaagtaacttccacactgtcaagagttgacagcatattaattgtgtggcattataattgtgagaaacaaatgagagcaaaatgttaggtcctttgacaagcattttcctcctgtttttaaaaagggctttaagttgtttcctatgtaaggtaatctttcttttttagtattatctaagaaggatggtagattatgtcattttggaaactattgtgtcccttgtattttaaatatttcaggaaaatgcctacgattgttacaaagatgtgtgttttacttataacataagctctgattctccagtggccactgggccttctctgtgctctgtattcaactgcagtatgaattacagaatgctgtgcatgttcgttagtaccaataccatgtgtatgtggtagaagttgtaaccagtttctggatctgtatggtactataaaatacttattttataattctgtaaccgtatggcagtgttatgccaaaaatgtataaagagcaatagtttttgttgcttactgctgtattttaaaatattgtttctaaaataatagagttagagttccttttgagtaattatttttaagaactattgccaaatatacatcctgtaaaactaataaaagccactccatcttagataacattttagcattgtgctagagtacattatggtgattttgcacgattaaaatatttttaaagaactagaaaaaatgacttgctgttttcctgtcattaagcatgtattttttatgattaacacataagactaacattattttcttttatcctcaaaaataaatattgtgaagggtgaatcata

SEQ ID NO: 82 - DNA, 1904 bp, Homo sapiens
gaccgttgaaggaaagcgcatgcgcgtcgggcacagcgcgtgcagcctcgtgcagctcttctggtctccggcgcccgcccctcagacgtaatgttgaattaaagaaaatactttatcagaagaagatggccactgcccagttgcagaggactcccatgagtgcactggtatttcccaataagatatcaactgaacaccagtctttggtgttagtgaagaggcttctagcagtttcagtatcctgtatcacgtatttgaggggaatattcccagaatgcgcttatggaacaagatatctagatgatctttgtgtcaaaatactgagagaagataaaaattgcccaggatctacacagttagtgaaatggatgctaggatgttatgatgctttacagaaaaaatatctaaggatggttgttctagctgtatacacaaacccagaagatcctcagacaatttcagaatgttaccaattcaaattcaaatacaccaataatggaccactcatggacttcataagtaaaaaccaaagcaacgaatctagcatgttgtctactgacaccaagaaagcaagcattctcctcattcgcaagatttatatcctaatgcaaaatctggggcctttacctaatgatgtttgtttgaccatgaaacttttttactatgatgaagttacacccccagattaccagcctcccggttttaaggatggtgattgtgaaggagttatatttgaaggggaacctatgtatttaaatgtgggagaagtctcaacaccttttcacatcttcaaagtaaaagtgaccactgagagagaacgaatggaaaatattgactcaactatactatcaccaaaacaaataaaaacaccatttcaaaaaatcctgagggacaaagatgtagaagatgaacaggagcattatacaagtgatgatttggacattgaaactaaaatggaagaacaggaaaaaaaccctgcatcttctgaacttgaagaaccaagtttagtttgtgaggaagatgaaattatgaggtctaaagaaagtccagatctttctatttctcattctcaggttgagcagttagtcaataaaacatctgaacttgatatgtctgaaagcaaaacaagaagtggaaaagtctttcagaataaaatggcaaatggaaatcaaccagtaaaatcttccaaagaaaatcggaagagaagtcaacatgaatctgggagaatagtcctccatcactttgattcttctagtcaagagtcagtgccaaaaaggagaaagtttagtgaaccaaaggaacatatataaaaattatttttgttctgcaggcttgcagagttcttctcaccatttaaactgaaggaccctatattatatttccctaactctgaagatgtatatgtagtttaaagcagtttgtacactaaaactaagtttttggctgactgtcatattgtggtccttaatcttgagataaatccaatagaacttttgaataaaagcaaaagtacaaatgtcataattgattcggtaataagtaaaatttcaaaattgattttgttcattacctacttaatatttcctttaaatatatactaactgttaaggccctctaatgccatttttctaaacagtaatgtttactttggtattaaaatttggtatggattcactttttacttatgttaaaattataccatttaactggctcttttgtcattgtgctgttattaaaacaatgttcttcaatattttgacataatgtattaacattttaatatataatgtacaatttaagaattggtgctttacctttactatgcttttttttacaggacaaaaagactgatttttaaagtatggcattttttgcagcataaataaaatattgttcagtacgta

SEQ ID NO: 83 - DNA, 7813 bp, Homo sapiens
ccttttcctctcctcccccaggccggcggggaggcagcttccaccgccctccgcgcgccctcacccggccttgctctgcctccggggaccgccagcagcccgcctccaaaagtttgatcatctctctctctctttttcttgcttcttcttcctttttggtggaagcagaaaaggaccgaggcaggggcgagcgcggcgcccggactcctgggaccatgggcctggcgcgggcgcccgcggggccccagccgcgctgcctgcctgctcgggcgcccctgggcgcggggctgcgctgggggcgcgggggccgcgcgctctaagccggcctggcgcggcggggcggggggctggcggccccatggggcgcgcccacacttgccccccgggctcgggagcatgaagtaggggcctgccatgggagcgggatcggcgcggggggcccgaggcacagcggcggcggcggcggcgcgcgggggggggtttctcttctcctggatcttagtctcgtttgcctgtcacctggcctccacccaaggagctcctgaagatgtggacatcctccagcggctgggcctcagctggacgaaggccgggagccctgcacccccgggagtcattcctttccagtcgggcttcatctttacgcagcgggcccggctccaggctcccacgggcaccgtcattcctgccgccttgggcacagagctggcactggtgctgagcctctgctcccaccgggtgaaccatgccttcctcttcgctgtccgcagccagaaacgcaagctgcagctgggcctgcagttcctccccggcaagacggtcgtccacctcgggtcccggcgctcagtggccttcgacctcgacatgcacgacgggcgctggcaccacctggccctcgagctccgaggccgcacagtcactctggtgactgcctgcgggcagcgccgggtgcctgtcctgctgcctttccacagggaccctgcactcgaccctgggggctccttcctctttgggaagatgaacccgcatgcagtccagtttgaaggtgctctctgccagttcagtatctaccctgtgacgcaggtcgctcacaattactgtacccacctgaggaagcagtgtggacaggctgacacgtaccagtccccactgggacctctcttctcccaagactctggcagaccttttaccttccagtccgacctcgccctgctaggcctggagaacttgaccactgccacaccagccctggggtcactgccagcaggcaggggacccagggggactgtggcacccgccacgcccaccaagccccaaaggactagccccacaaaccctcaccagcatatggcggtgggaggcccagcccaaaccccgctgctacctgccaagctgtcagccagtaacgcacttgatcccatgctcccagcctctgttggcggctctaccagaacgcctcgccctgcggccgctcaaccatcacagaagatcacagccaccaaaatccccaaaagcctccctaccaagccttcggccccttctacttcaattgtgcccatcaaaagcccccatcctacccagaaaacagctccatcttcatttacaaagtcagccctacccactcagaagcaagtgccacctacttcccgtccagttcctgccagagtctcccgtcccgcagagaagcccatccagaggaacccgggaatgcccaggcccccaccgcccagcacccggcccctacctcctaccaccagctcctctaaaaaacccattcccacactagctcggactgaggccaagataaccagccatgccagtaagccggcctctgcccgcaccagcacccacaaacctcccccatttactgctttatcctcatctcctgcccctactcctggttctaccaggagtactcggccaccagccacgatggtacctccaacttcgggcaccagcactcccagaacagcacctgccgtccccactcctggctcagctcccactggaagcaagaagcccattggatcggaagcctcaaagaaagccggacccaagagcagcccccggaagcctgtccccctcagacctgggaaggcagccagggatgtccccttgagcgatctgacaaccaggcctagccccagacagccccagcccagtcagcagaccaccccggccctggtattggccccggcgcaattcctgtcctccagcccccggcccacgagcagtggctattcgatcttccacctggcaggatctacgcctttccctctgctgatggggcctccgggacccaagggagactgtggcttgccgggtccccctgggctacctgggctacctggaatccctggtgcacgtgggcctcggggtcctcctgggccttatggaaatccaggtctccccggccctcctggagccaaaggacagaaaggggacccagggctctcaccaggaaaggcccacgatggggcaaagggtgacatgggcttgcctgggctctccgggaatccaggacctccgggacgaaagggacacaagggctatcctggaccggcagggcaccccggagaacaggggcagccaggacctgagggcagcccaggggccaaaggttaccctggcaggcaggggttacctggaccggtaggagatcccggccccaaaggcagcaggggctacattgggctcccagggctcttcggcctgccagggtctgatggagaacgaggcctgcctggcgttcctggcaagaggggcaagatgggtatgccggggtttcctggagtctttggggaaagaggccctcctggactggatggaaatcctggagaactgggcctgccaggcccccctggagtccccggcctcattggtgacttaggagtgttgggtccgattggctacccgggacccaagggcatgaagggactgatgggcagcgtgggggagcccggactgaaaggtgataagggtgaacaaggggttccaggtgtgtcaggagatcccggattccaaggagacaaggggagccaggggttgccagggttccccggtgcacgggggaagccagggcctctgggcaaagtcggagacaaaggatccattgggtttcccgggccccctggacccgagggattcccaggagacatcggcccccctggcgacaatggcccagaaggcatgaagggtaagcctggagcccgaggcctgccgggaccccgtgggcagctggggcccgagggagatgagggacccatggggccgccaggggcccctggcttggagggtcagcctggcaggaaggggtttcctgggaggcccggcctggatggcgtgaagggggaaccaggggatcctggtcggccggggcctgtgggagagcagggatttatgggattcattggtctggtcggggagccaggaatcgtgggagaaaagggtgatcgtggcatgatgggacccccaggcgtgcctggacccaaggggtcgatgggtcatcctggaatgccaggtggtatggggacccctggagagcctggaccccagggtcctccaggatctcgaggcccaccaggcatgaggggagcaaagggacgtcggggcccccgaggaccggacggaccagctggggagcaagggtccaggggcctgaagggccctccaggaccccagggcagaccgggccggcctggacagcagggtgtggctggtgagcgaggccacttgggctcgagaggctttcctggcatcccgggtccctcaggccccccaggcaccaagggcctcccaggagaaccgggccctcagggaccccaggggccaattgggcctccaggagagatgggacccaaggggccgcctggtgcagtgggagaaccgggccttcctggggaagccgggatgaagggtgaccttggacccctgggcactcctggggagcagggcctcattgggcaacggggagagccaggccttgagggtgacagtggccccatgggacctgatgggctgaagggggacaggggagacccagggcctgatggagaacatggcgagaaaggccaggaagggctgatgggtgaggacgggccccccggcccccctggcgtcactggtgtccggggtcctgaaggaaaatcagggaagcaaggcgagaagggccgcactggagccaagggtgccaagggctatcaaggacagctgggtgagatgggcgtccctggagaccctggaccccctggcactccaggccctaaagggtcccggggcagcctgggaccaacgggtgctccgggacgcatgggggcccaaggagaaccgggactggctggttatgatggacacaaaggcattgtgggaccccttggacctcctggaccaaaaggcgaaaagggggagcagggcgaggacggcaaggctgaggggccccctgggccacctggagatcggggccctgtgggtgatcgaggagaccgcggggaaccgggagaccctgggtaccctggacaggagggtgtgcaaggcctccgtggaaagccaggccagcagggccaacccgggcatccgggaccccgggggtggccgggacccaaaggatcgaaaggcgcagagggaccaaagggaaagcaaggcaaggcaggggccccaggccggaggggggtccagggcctgcaggggctgccagggccccggggcgtggtggggagacagggcctcgagggcatcgctggaccagatgggcttcctggcagggacgggcaagcaggacagcagggggagcagggagacgatggggaccctggccccatgggccctgctgggaagagaggaaatccaggtgtggccggcttacctggagcacagggacccccaggattcaagggtgagagtgggttacccggacagctgggtccccctggcaagcgaggaacagagggcagaacggggctccctggaaaccagggggagcctgggtccaaaggccagccgggcgactctggcgagatgggcttcccaggaatggcaggtctcttcggacccaagggcccgcctggagacattggcttcaaaggcatccagggccctcgggggccacctggcttgatgggaaaggaaggcatcgtcgggcccctcggaatcctgggaccttcgggactcccgggtccgaagggtgacaaaggcagccgtggggactggggattgcaaggtccgaggggtcctcccggccccagagggcggcccggccccccgggtcctccagggggtcctatccaattgcaacaagatgatcttggggcagctttccagacgtggatggacaccagtggagcactcaggccagagagttacagctatccagaccggctggtgctggaccagggaggagagatctttaaaaccttacactacctcagcaacctcatccagagcattaagacgcccctgggcaccaaagagaaccccgcccgggtctgcagggacctcatggactgtgagcagaagatggtggatggtacctactgggtggatccaaaccttggctgctcctctgacaccatcgaggtctcctgcaacttcactcatggtggacagacgtgtctcaagcccatcacggcctccaaggtcgagtttgccatcagccgggtccagatgaatttcctgcacctgctaagctccgaggtgacccagcacatcaccatccactgccttaacatgaccgtgtggcaggagggcactgggcagaccccagccaagcaggccgtacgcttccgggcctggaatggacagatttttgaagctgggggtcagttccggcccgaggtgtccatggatggctgcaaggtccaagatggccgctggcatcagacactcttcaccttccggacccaagacccccaacagctgcccatcatcagtgtggacaacctccctcctgcctcatcagggaagcagtaccgcctggaagttggacctgcgtgcttcctctgacctctgacctcgtggccactctaggcctcacggaggagggaagaggaagaggcaaggggagggtactgaggggcagatggctccaggagaggcagctcccctgcccaagggtccttgggcagaccccagctgttgtctgcccagtagaagtgggtgggggtaggaggggatagggtgtccttgggaacaatggatcccagcttagccccaaagaccaaccaaagagccagccagagtaagctggacctgcaacctgcctgagccccgtggcctctcagctctgcggccaccccgttccctccccagcttcctgcccaaagagccccacattcaagccaacttgagggaagggggcgtctcgtcagctggtccctgctagggagctattgatgtgcaatattagaaaggagacatgaaaaaaggagaaaaggaaagacagaagtgtatatatatattatttaaacaaacaaaaagaaggtgcgttactatttttttttcacccgggaaagaggtgagaggatgggaaggagcagccaggcgtgggaagcggcgagatcctcgggctgggggtgcccacgtttgctacctcccactgtgaaatcgctggtgctcacaattgtctctcacagtgtatgtgatttttttaaggaaaaaaaaaaatccctatttaagattctgaaggtgctaccattattttgccacagactttgaagaaacttttggatgtggggcatcatccgcatctttctctctcctccaaatgacaaagtttggggaatttttgaattttcctagcatcgcccttgtgctcatcaggtaatctgctaaggaggaaaaaagaaaagaaaaaaggaaaaaaaaaaaaaaaaagcaaaacaaaaacaaaaacaaaaaccctaccagaaaccagaagtagagagatttaccatataacttatggactttgaaatgtctgtccttttaaggcagcagggaggcctgggtgcgaagcatgttggcttggcccttcacggtcctggagggaggtgaggctggccttggaaggcgtgccctggagaggtcttgggtgaaaacttgaccttgaagaaaccaatcacaaaagcggcgttgggtcagggctaggcttagaggtgaagcatcaacatggaaccatctcaggaagccgcatcgcctcttccgaggtcctcacttccaggagcctgtccttgcaagatgcaatcatcgttcctgctttttcattgtcattaaattctgtagaaacccattgtcattagctccaagtgtaaatttgggtcaaggagacagaataataatgggaatctcggagttcgacaccatagtgacgttcagcgtcctctgaattgtgctacatcagcgaacaagtcggcgcttgaattggattttgaggttattttaaccatggaattatttttatagaaggggaaaatgtatgtgaaagtctctatttgtgtatttctctcctaaagttgtgtctctttgggaattggatttgatttttattatttaatacctcactttggcccgtcccccctcccaacacttctgtatcctcgccctgccgccccagcctggacgctctgcgtggaagtgcgtgtttgtagcagctcgggcctcatctcagcgctcggatccctcctgctgccagaatccactggcctctgtctcattcttgggttttcctgctgtcttcgtttacgtctctgtccacatgtcagtgtattaaaaccccaatgggttccgtttctccttttcccctctggattttaaataaatatttaaaactgaggcaatggaa

SEQ ID NO: 84 - DNA, 2269 bp, Homo sapiens
acaatcggcggcgccctgggcggccgcggagtcatggacggcagtggacccttcagctgccccatctgcctagagccactccgggagccggtgacgctgccctgcggccacaacttctgtctcgcctgcctgggcgcgctctggccgcatcgtggcgcgagtggagccggcggacccggaggcgcggcccgctgcccgctgtgccaggagcccttccccgacggccttcagctccgcaagaaccacacgctgtccgagctgctgcagctccgccagggctcgggccccgggtccggccccggcccggcccctgccctggccccggagccctcggcacccagcgcgctgcccagtgtcccggagccgtcggccccctgcgctcccgagccgtggcccgcgggcgaagagccagtgcgctgcgacgcgtgccccgagggcgcggccctgcccgccgcgctgtcctgcctctcctgcctcgcctccttttgccccgcgcacctgggcccgcacgagcgcagccccgccctccgcggacaccgcctggtgccgccgctgcgccggctagaggagagcctgtgcccgcgccacctacggccgctcgagcgctactgccgcgcggagcgcgtgtgtctgtgcgaggcctgcgccgcacaggagcaccgcggccacgagctggtgccgctggagcaggagcgcgcgcttcaggaggctgagcagtccaaagtcctgagcgccgtggaggaccgcatggacgagctgggtgctggcattgcacagtccaggcgcacagtggccctcatcaagagtgcagccgtagcagagcgggagagggtgagccggctgtttgcagatgctgcggccgccctgcagggcttccagacccaggtgctgggcttcatcgaggagggggaagctgccatgctaggccgctcccagggtgacctgcggcgacaggaggaacagcgcagccgcctgagccgagcccgccagaatctcagccaggtccctgaagctgactcagtcagcttcctgcaggagctgctggcactaaggctggccctggaggatgggtgtggccctgggcctggacccccgagggagctcagcttcaccaaatcatcccaagctgtccgtgcagtgagagacatgctggccgtggcctgcgtcaaccagtgggagcagctgagggggccgggtggcaacgaggatgggccacagaagctggactcggaagctgatgctgagccccaagacctcgagagtacgaacctcttggagagtgaagctcccagggactatttcctcaagtttgcctatattgtggatttggacagcgacacagcagacaagttcctgcagctgtttggaaccaaaggtgtcaagagggtgctgtgtcctatcaactaccccttgtcgcccacccgcttcacccattgtgagcaggtgctgggcgagggtgccctggaccgaggcacctactactgggaggtggagattatcgagggctgggtcagcatgggggtcatggccgaagacttctccccacaagagccctacgaccgcggccggctgggccgcaacgcccactcctgctgcctgcagtggaatggacgcagcttctccgtctggtttcatgggctggaggctcccctgccccaccccttctcgcccacggttggggtctgcctggaatacgctgaccgtgccttggccttctatgctgtacgggacggcaagatgagcctcctgcggaggctgaaggcctcccggccccgccggggtggcatcccggcctcccccattgaccccttccagagccgcctggacagtcactttgcggggctcttcacccacagactcaagcctgccttcttcctggagagtgtggacgcccacttgcagatcgggcccctcaagaagtcctgcatatccgtgctgaagaggaggtgatgccgggcacgggcgctcctgctgccgtctctgctccaggaagctgcctcctctgggccctctccttcgtctgggaaggcaccagcatgagtcccacacacccagccttctcatttctagaggcttccacctttttatacactcagccttccctctcccaggcaggaggacccccagaccctgttcccctgcagacctcacttctgggagacagagctacagctgggacagctccaagctaccctaacccctcctttcccaggtttctagaatagtgtctggcatgtagtagatgctcaataaacacttgttgaatgaa

SEQ ID NO: 85 - DNA, 4478 bp, Homo sapiens
gacgtcggcggttgccgtggagagacccgctcggtcccgaccgagagctggcgtcaggagccgcagggtcacagcgtgtctttgaagctgcctccgccgccaccatgagcggccgaagtcggggtcgaaagtcctcccgcgccaaaaaccggggcaaaggccgcgccaaagcccgagtccgccctgctccggacgacgccccgcgcgacccggacccttcacagtaccagagtctcggggaagacacccaggcggcacaggtgcaggctggcgcggggtggggtggcctggaagccgctgcgtccgcgcagctcctccggctcggggaggaggccgcctgccggctccccctggactgtggcctcgcgctgcgggcccgagctgcgggggaccacgggcaggccgcggccaggcccggcccggggaaggccgcatctctctcggagcgcctggccgcagacactgtcttcgtgggaacagcgggaaccgtgggaaggccgaaaaatgccccccgcgttggaaaccggcgtggccctgccgggaagaaggccccagaaacctgtagcaccgcggggagggggcctcaggtcatagctggtgggaggcagaagaaaggggcggcaggggagaatacctcggtgtcagctggggaggaaaagaaggaagagagggatgcagggtcggggcccccagcgacggaaggcagcatggatacgctggagaacgtgcagctgaagctggagaacatgaacgcccaggcggacagggcctaccttcggctctccaggaagtttgggcagttgcgactgcagcacttggagcgcaggaaccacctcatccaaaatatcccgggcttctgggggcaagcatttcagaaccatccccagctagcatcctttctgaatagccaagagaaagaggtactgagctacttaaacagcttggaagtggaagagctcggccttgccagattgggctacaaaatcaagttctacttcgatcgcaacccgtatttccaaaataaggtgctcatcaaggaatatgggtgtggtccttctggccaggtggtgtctcgttctactccaatccagtggctcccagggcatgatctccagtccctaagccagggaaacccagaaaacaaccgtagtttctttgggtggttttcaaaccacagctccattgagtctgacaagattgtggagataatcaacgaagaattgtggcccaatcccttgcagttctaccttttgagtgaaggggctcgtgtagagaaaggaaaggaaaaagaaggcaggcaaggtccaggaaagcagccaatggagactactcagcctggggtgagccaatccaactgatcctgcacaagtctccctgctacctcctgctgggctgctcctggttgactacatatttggctctctgccttctcttcatgttggcctctgtgtactatagaccctttggactttagttacaagaatatggcatttatgatcatgttcttttgcctcccatagcctcttgcttttctacgttagtgtcacatgttatgtgatcgcacccggactgttcatatgttaagcacacatactttagatgtgtgctccctgttatctacattgcctggaccttgttcttggctctggcctttcctacttgtctttaacatggacactcatgagtcatcctccaggacgaccagtgcatcctcaagctctgctccttcagggccagtgacttgctgggcttcgtgttcatgctggccatgcatgtcatctatgcaagcgtttccattgccactgcagaatgaagccagtgcacatggtattagtcatcagccagaacttcctgttctgtgggtctggggtcaccagctgagatgtcacctgctttatttctggctttggcctgtggtctgtgatacccatcctgcttgatgttctgcagaatggcacttgactgctgggcatgcatgaagttaagggcaagaaacagtatgccatgtgttctgtaccatcatgtgtctcttcttgcttctgggcccttctactggtgaactttcatcaagatctgcgccatgccgtgtcactatcaagccattaagttttgtctgggttgctgtcagccccagttggcttcctggtcaacaaggacctcaagaactgcctgtggaccgaggccccctaccagtgcatgagacacacacctaccctccccagctttccaggaaccctactggctgccagactgatgggcgggctggtatgtgtggacatgtgttcactgtcattatgctgtggctccaggtgagggtgaggactgggcctatatagaatccagataccattgtcaacttcccttattcccgtctaagatgtgagcagagtgccatagtaggggttctgggaagaggtatttctgatttgtgggcctctgcttgcttgacttcaggtcacttatacttcttattttgcttgcctgccttcatccctcatttcctccctctcattcttctttcctccctccctttcctggtagcctcctttcctccccttctgccttccccttccttctttccttattcttttttattttgtttaaatagtaccacagagaaaacaactgaaaaaccacatttttctacatacagctggggaggtagctgagaacttggcactgcgcacacatactaggttgaaagagagttgaggaaaccagaaggccaagtggatctgctggcaaaccctgaacctgtctcctgcgcttgctctacagttctgaagttgaaaatccttttcatgcctagcatctgcttgagttataaaccccaaggcagccatgtcatagactagtgtttactcttgttttgactttgttttaatgcttcctaagacccaagtgcctcctgctgtttcctcctttgtggtagcctctggccatctggacctcaatccccagctttcccactttcagcagtcctttgctctctttgcttctacctcaaatagccccaggagtgggctttagtctccaatatggagcatctcaagcttctcctgggggatggggattgggatgggcagaatctgttttggatctccgggttatttccagtgggtgtaaaagcagagctgggcctttccctctcttatccctgagggtgggtaagaaggactgtatctacacctgttcttccctaccttctcttttgttagggaggcctcattctaagttcctcaagagagtccttggcttaaagctgtagcaagggtgtgctaggtgggggatttggagcaaaaccgtcgagtaggcatgatactggtatggagtgggcctgcaaaatcagacagaaatggcttgagaagccgcagggggagcatgcctgtctctcagtgatagagtatgggagggacctccctagcttggaaaatgagaattgaaggggttatgaacaaataggatgcctagttgaggatgttcccaaagttttgtccaatcttatcattagtagattttataagccacagagacaaaccagaaacggaataatgttactttggatgctttatttttttgttctaggtgtggctttgtacatgcagaagaatgctatatgctgcacattttgcctttaaagtcttacgactttccccattttagtctaatgggaagatacagatgtgcaagtctgcttttttgttttttgttattatttttttttttttgctctgtgttatggacattttcagacatgcacagaagtggagaggatggtccttggaccccatgtgtccatcacctagctgcatcacttatcagctatggtcaacctggtttcatctgtatctctctcttttcacctgtattgtttattgaaaatccaagacactatgccaatgcaaccgtgactactttgggagattggtagtctcttttgatggtgatagtgatggggtgcactatcataatcacatcaggtctgctttttgcttttaatgttaactaatgaagttccagagatgggccttagaaatgtgttttaagaattaacaaggagtctcaaaaagaaatgagagggatgcttcctttcccttgcatctacaaaacaagagagagactgttctgttgtaaaactctttcaaaaattctgatatggtaaggtacttgagacccttcaccagaatgtcaatctttttttctgtgtaacatggaaacttgtgtgaccattagcattgttatcagcttgtactggtctcataactctggttttggaagaataatttggaaattgttgctgtgttctgtgaaaataacctccccaaaataattagtaactggttgttctacttggtaatttgacaccctgttaataacgcaattatttctgtgttcttaaacagtataaatagttgtaagtttgcatgcatgatggaaaaataaaaacctgtatctctgttataaaaaaaaaaaaaaaa

SEQ ID NO: 86 - DNA, 3103 bp, Homo sapiens
gcagtcgttgccacccgcggagatgaaatgtgagcctgggtggccaaggacgccggagtggccgccttccccgcgcctgagcgcagtggggcgagacaaagagacctgggcccccagcgcagcccgtctcgggccacgggcgccccagctccgcggagtcccgcagtcgctggcccgggacgcgcccggcccgggctcccttggaaggctccctaggcaatggccgggtctctgctccacccggctctcaggagcgctgctctctccatctgatcgccctccatcctccccattccctccggttccgggctctcccttcgctccaagcctcaggccaccggcttggatggacgctccgaggctacccgtgcgtccaggggtcttgcttccgaagttggtcctgctctttgtctacgcagatgattgccttgctcagtgtggcaaagattgcaaatcttactgctgtgatggaaccacgccctactgttgctcctactacgcttatattgggaatatcctctcgggcactgcaattgcgggcattgtttttggaatagtatttatcatgggggtcattgctgggattgccatatgcatctgcatgtgcatgaagaaccacagggcgacccgcgtgggcatcctcaggacgactcacatcaacaccgtctcctcctatcctggaccaccaccctacggtcacgaccacgagatggaatactgtgcagacttgcctcctccatactcccccaccccacagggtccagcacagcgttctccaccccctccttatcctggaaacgcaaggaaataatctatctcccagaacagaacatgtgccaatgggcgatcttgcctggaataaaatgcctctactcagaaacaggcaggaaagaattgctccaaggaatactttttggggtcagataatgtgtcaggtggaatatccctgctaggagatataggatttctactctgctcaaagctgaccccatctggagtattaatgtttggttctatggaaccacattttaagagatctgctgatccacctaagcacattcagggaagagtaatgtaattgacaaaatatctgataatcatgttgtttaagggctaggtgaagaaagtttcagtattgatcctggaaaaaaagaagatctaagtaggatgggagaatgatttggcccacacaaggaagcaactttattctatatagctttaaaagtcagaactagaattgttcattctttcattcatcaataaatgtattttgagtgcctaagagtttactatgtgcctagcactgtttgaggtcctgatggaagttacaggacgggtactctggttttagtacaagaaagagcaatgactagattgctttgtgaagctcttggtagagacacgctccagaagggataacaaaatcaaatagtagatgggttcattgggcctcagaagttctgctcgtattttaggtgggtgtgaagtgaatttctatatgtccaggagtgaatacaacagaaagagttggatcttatttatttaattagggagttaaaacaagaccaaaaagactcaacagccgcttgaagccaagaactcttcaatgccagctactgccacctaaaaatcatctggctttatagtggatcagaataaaggttattctaactgtggggagaaaaaaaaaattgtatcaagttccacaggtagcagacacttcacttccaagtaaaagatgagaaatcaattattcccacaggattttaggtcagggagcaaaaatctcagaacttgaccatgaagatacacaacagactcgcaaaaataaagtgggaaatgaagttcagattcccttctgtagatttccttaaaactattatttttttcttcttcgtaaaattttgataatctgttctcttaaaaaagttaatgacacaattaagatactgacatcaaattgttgccttttaccaaaatgcaaattttatgaagtgcctacctttatatgtataaagcatttaataaataattctaatgtgccatattttgctgtgagtgaccttaacatttatatttttatatgaattgtttcatgtatttataaaaattgtatattgaacattggaaatagatgattagatttttgtgtcattttacaattaaatctaaaatgcttaatccaatatcatcatcaaaattcagtgaaatcccaaaacagtgccaagaattttgctgaatgaaacaatcaaacaaagcattttaaggtgtaagttatagtacctgtacttgcagataagaagcttactatatcattattataagtagcatatattactttcaaatacctatattagaaagatattgatctgactgaaatataacctacctgccagtaaggtccaaaggctgaatttgttttgaatgagttccttgatctttaagcactgatgattttcttatatatgaggatgcaaagcattcaagagtttcagcctgttctggtgaggggctccctgacttacataaagttttcagtgcaattttaatagtacatatgctttaatttatttttcttctgcgtgtggtcagacccaattacactgtggctaagactctcaaagtgccagggtttctgtgatgattctgagaatgctgaatacaaatataccttatattctttaaggaaaacggaaaggaaagatcagcagaaatagggttttctcatcttcaccatcaataaacatttattgcgtacctcctatattctgcaaattttccccaaatagaagccagttcagtccacaccatctcttctttgagttgtttatggcctcccttaaggcattttacaaacccataagcctacaatagatgagtatttttactatttgtattaagtgtcataatagcatcaatgtgcacattaccagtatagactgttggagttcactgattgttttcatagatgatgcttcttggggaaaaatagtataggatgtgaaagttttgaattacggttatttaaaaactaacatttgctatggccaaagtgtttacaataagcaataaagtgaaagaacctattataacacagattata

SEQ ID NO: 87 - DNA, 5127 bp, Homo sapiens
gaccctggaaaaatctgtctcacccacaaagatgtgggctcagctccttctaggaatgttggccctatcaccagccattgcagaagaacttccaaactacctggtgacattaccagcccggctaaatttcccctccgttcagaaggtttgtttggacctgagccctgggtacagtgatgttaaattcacggttactctggagaccaaggacaagacccagaagttgctagaatactctggactgaagaagaggcacttacattgtatctcctttcttgtaccacctcctgctggtggcacagaagaagtggccacaatccgggtgtcgggagttggaaataacatcagctttgaggagaagaaaaaggttctaattcagaggcaggggaacggcacctttgtacagactgacaaacctctctacaccccagggcagcaagtgtatttccgcattgtcaccatggatagcaacttcgttccagtgaatgacaagtactccatggtggaactacaggatccaaatagcaacaggattgcacagtggctggaagtggtacctgagcaaggcattgtagacctgtccttccaactggcaccagaggcaatgctgggcacctacactgtggcagtggctgagggcaagacctttggtactttcagtgtggaggaatatgtgctgccgaagtttaaggtggaagtggtggaacccaaggagttatcaacggtgcaggaatctttcttagtaaaaatttgttgtaggtacacctatggaaagcccatgctaggggcagtgcaggtatctgtgtgtcagaaggcaaatacttactggtatcgagaggtggaacgggaacagcttcctgacaaatgcaggaacctctctggacagactgacaaaacaggatgtttctcagcacctgtggacatggccacctttgacctcattggatatgcgtacagccatcaaatcaatattgtggctactgttgtggaggaagggacaggtgtggaggccaatgccactcagaatatctacatttctccacaaatgggatcaatgacctttgaagacaccagcaatttttaccatccaaatttccccttcagtgggaagataagagttaggggccatgatgactccttcctcaagaaccatctagtgtttctggtgatttatggcacaaatggaaccttcaaccagaccctggttactgataacaatggcctagctccctttaccttggagacatccggttggaatgggacagacgtttctctggagggaaagtttcaaatggaagacttagtatataatccggaacaagtgccacgttactaccaaaatgcctacctgcacctgcgacccttctacagcacaacccgcagcttccttggcatccaccggctaaacggccccttgaaatgtggccagccccaggaagtgctggtggattattacatcgacccggccgatgcaagccctgaccaagagatcagcttctcctactatttaatagggaaaggaagtttggtgatggaggggcagaaacacctgaactctaagaagaaaggactgaaagcctccttctctctctcactgaccttcacttcgagactggcccctgatccttccctggtgatctatgccatttttcccagtggaggtgttgtagctgacaaaattcagttctcagtcgagatgtgctttgacaatcaggtttcccttggcttctccccctcccagcagcttccaggagcagaagtggagctgcagctgcaggcagctcccggatccctgtgtgcgctccgggcggtggatgagagtgtcttactgcttaggccagacagagagctgagcaaccgctctgtctatgggatgtttccattctggtatggtcactacccctatcaagtggctgagtatgatcagtgtccagtgtctggcccatgggactttcctcagcccctcattgacccaatgccccaagggcattcgagccagcgttccattatctggaggccctcgttctctgaaggcacggaccttttcagctttttccgggacgtgggcctgaaaatactgtccaatgccaaaatcaagaagccagtagattgcagtcacagatctccagaatacagcactgctatgggtgcaggcggtggtcatccagaggcttttgagtcatcaactcctttacatcaagcagaggattctcaggtccgccagtacttcccagagacctggctctgggatctgtttcctattggtaactcggggaaggaggcggtccacgtcacagttcctgacgccatcaccgagtggaaggcgatgagtttctgcacttcccagtcaagaggcttcgggctttcacccactgttggactaactgctttcaagccgttctttgttgacctgactctcccttactcagtagtccgtggggaatcctttcgtcttactgccaccatcttcaattacctaaaggattgcatcagggttcagactgacctggctaaatcgcatgagtaccagctagaatcatgggcagattctcagacctccagttgtctctgtgctgatgacgcaaaaacccaccactggaacatcacagctgtcaaattgggtcacattaactttactattagtacaaagattctggacagcaatgaaccatgtgggggccagaaggggtttgttccccaaaagggccgaagtgacacgctcatcaagccagttctcgtcaaacctgagggagtcctggtggagaagacacacagctcattgctgtgcccaaaaggaaaggtggcatctgaatctgtctccctggagctcccagtggacattgttcctgactcgaccaaggcttatgttacggttctgggagacattatgggcacagccctgcagaacctggatggtctggtgcagatgcccagtggctgtggcgagcagaacatggtcttgtttgctcccatcatctatgtcttgcagtacctggagaaggcagggctgctgacggaggagatcaggtctcgggcagtgggtttcctggaaatagggtaccagaaggagctgatgtacaaacacagcaatggctcatacagtgcctttggggagcgagatggaaatggaaacacatggctgacagcgtttgtcacaaaatgctttggccaagctcagaaattcatcttcattgatcccaagaacatccaggatgctctcaagtggatggcaggaaaccagctccccagtggctgctatgccaacgtgggaaatctccttcacacagctatgaagggtggtgttgatgatgaggtctccttgactgcgtatgtcacagctgcattgctggagatgggaaaggatgtagatgacccaatggtgagtcagggtctacggtgtctcaagaattcggccacctccacgaccaacctctacacacaggccctgttggcttacattttctccctggctggggaaatggacatcagaaacattctccttaaacagttagatcaacaggctatcatctcaggagaatccatttactggagccagaaacctactccatcatcgaacgccagcccttggtctgagcctgcggctgtagatgtggaactcacagcatatgcattgttggcccagcttaccaagcccagcctgactcaaaaggagatagcgaaggccactagcatagtggcttggttggccaagcaacacaatgcatatgggggcttctcttctactcaggatactgtagttgctctccaagctcttgccaaatatgccactaccgcctacatgccatctgaggagatcaacctggttgtaaaatccactgagaatttccagcgcacattcaacatacagtcagttaacagattggtatttcagcaggataccctgcccaatgtccctggaatgtacacgttggaggcctcaggccagggctgtgtctatgtgcagacggtgttgagatacaatattctccctcccacaaatatgaagacctttagtcttagtgtggaaataggaaaagctagatgtgagcaaccgacttcacctcgatccttgactctcactattcacaccagttatgtggggagccgtagctcttccaatatggctattgtggaagtgaagatgctatctgggttcagtcccatggagggcaccaatcagttacttctccagcaacccctggtgaagaaggttgaatttggaactgacacacttaacatttacttggatgagctcattaagaacactcagacttacaccttcaccatcagccaaagtgtgctggtcaccaacttgaaaccagcaaccatcaaggtctatgactactacctaccagatgaacaggcaacaattcagtattctgatccctgtgaatgaggataggagctggaaactcaattagtcctctgtgacatttactggagggtggaacattcttctgtcgcttgaagcagaactcattcaatcaaataatttaatttctctgactagtatatgggtaacaaatgaatatgtctgaacctcagctataatactttctactacctttgcaaggagatgggataggaacaatcactcagaggaggcgttgcatgggcagggtcatagggggaagaaaggtggtttagctgttttatttagccattcagggggctctccagagaggagacggtggtagagggtgaactagagaagataagaatgtcttcctaggccggatgcggtggctcacgcctgtaatcccagcactttgggattgcgaggtgggcggatcacttgaggtcaggagttcaagaccagcctggccaacatggtaaaacccgtctctactaacaatacaaagattagcctggtgtggtggcacgggcctgtaatcgcagccccttggaaggccaaggcaggagaatcgcctcaacactggaggtggaggttgcagtgagctgagattgtgccactgcactccagcctgggcaatgaggcaagaccctgtctcaaaaaataataaataataataataataatgtttttctagagtttcagtctaagggaaaatgtgatttagggctttggaaattggctaaaaaaataaaaatggaaaagaaaatctg

SEQ ID NO: 88 - DNA, 2160 bp, Homo sapiens
acactcagtctctgattttatccctgccctggcttaattaagtgctctgaagacataaataggttttttgtttactcaagcttgggagaagctggcagaaaaggccttttcagctaaaagctccttacagccggaaggtgtgaagcggcaagtttccagccgggaagaagcctctcagccgtaggcgtctttgcccggagctgtgagcccccctcccaactcccaaatcccccggcgtcggagatgaggccccggatgctgccagtgttctttggggagagcatcaaggtgaacccggaacccacgcatgagatccgctgcaactctgaggtcaagtacgcctcggagaagcatttccaggacaaggtcttctatgcgcccgtacccaccgtcacggcctacagcgagaccatcgtggcagcacccaactgcacgtggcgcaactaccgcagccagctgaccctggagccacgcccgcgcgccctgcgcttccgcagcaccaccatcatcttccccaagcatgccaggagcactttccggaccaccctgcactgcagcctgggccggcccagccgctggttcaccgccagcgtgcagctgcagctttgccaggaccctgcccccagcctcctgggccctgccacgctctgacggggctggggccggcccggggtgctggaggagccgggagccctggggagaagccgggaggatggacacgatgagctcggcctggcactcgggcaggaggcgggaagggaggctgccagaccaaggacccgtgtggaaggaggcggctccccgctgcctgccctgacctacaggctaggtggtggtctccttgttttggtgtcaaggactcagtaaaagcatctatttttttagcacttaagctggcaaggcggtaggggcatgcactgttaggtggtggccacccccagggtcaggggaaaagaatgggtccatggagtgcccttgaagcagagaacagccccgagcagtgtgaggacagaggcatcccagcctcagccggtggggacggctgccactcccccagagccctgccaccccatgtgtcctaggctggtggccaaggccatgtgtgagggaagaggggtacctctcttccctgctgctggcctggggtatttccaaaacagccttttcgcacacatgcaggttgcaccgagaggtctggagctgtggctgagccacctctggcggatgttgagccaggaggttgggcaaaggccggatgctgatgccagcgctggaggtggtgatactgggggcggggaaggcctagaaatactttgagccatggccttgccagtgtcccgtgccctccagtgtcaaagatttggggcactgcccgtcgaaatggaaaggttggtgctcagcctctggagcctcacctgcagggcgtccccagctaacacccatccacgcaccacctccaggacgagaacccttgatgtcaaaaccaagtgcccagtggaggcggtgaagctctcggaaatgctgccacctgtgtgaggccgggtctgaactcgagggagtcggagctcagctgtcggtttaaagagacactgaggggaccgggctgccgccctcagcctgcattcctgtgcgcaatcgattccgcaatgacagcaccttactccttcctgcggcaggctcacccctgcctgtgggatgttgtgagaggaacatgagccagacaaagacttggctcagggctccgtggaacaagccaggatgcacggggagctgggggagcccccagcctggggcagcccagcaggccgctgaacaaacaccccagaagccagcactgtggcagggtgctggggagatgcccctctgagccttcctcccccctcagacctgaatgcactccacagttgggggctgcccctgccactcccctggtaatgcataaaaggggaggggaaggttccctggggcttgagctccctctgtggaggtgaggaggggagattccgttcacatccaggaggggcaaaatgactgatgtatttttatgtatctacacagagagtgcattttctctccagagatgctgtctggttaacaaaggaataacttaagaaattgattgattatcttaataaactgtgcaaacccaaaaaaaaaaaa

SEQ ID NO: 89 - DNA, 11662 bp, Homo sapiens
tgcctgcttctaatttgggtacagctgaggctctttgccctcccttaacagccatcagctgtttgtactgctgccggaaaaagagaagttgtactggtggacgttcattaacgaagagctgtaaacatgctaaagtcctggggaaaaggcagcctttcattttttaaatttaaatcatgaatgggtcctgggttctctgaaagagcatcaggtgggaaacacaatgtaaatgatagagaaccatcaaacaaatatttttagagactatatggcaggcatctcaagccaagggaaaggatatccaccaccaaaacgtctaattggtaaggcactctgctgtactacagttttaagaacactacactagggggactgtactgtctgctgactactgtaatctctatgcacagttggagagcgcactataaacaataacccaaacaaacctcccttgcctgttggtgctgcgagtcccctgttcccagccatgacaatcagaataaacacagtccagaaatgtctcacccggtttctcttcttacagagtgacaaaacacctattctataagaaaacgaatgttagatgtttgcttccaggtgggcagtaggaagcccattgttatacccatcttaacagaatggttgttagaccagcagcatcagcaccacctgggaacttgttagaaatgcatatttttggggccctaccacagatctactgaaccagaaactttgtggcaggacccatcggtctgagttttaaaactaaagatttgatagccactgccctaggtattccagaggtagctttggaaggacctcaataccaaaccaccttacactttggccttaggacaggtaatcagggagctcacggcagtacttccagcaaacgggagggtcgtttacgagaggcacatacatttgctaaatgtaacgctcaggaagttattcccgtactcaaaggtcgaggggtcgcttcctctttacctccacctagattaagtcgccgattgaggttgaatttgagacccgacaggggtcgctgctgcccataaagagagaccaagggaacatggcaagagaatcccaggggctttgacatcacactaagctcctccttgcacgcacacattatacacacacacacacacacacacaaacatacagacacacacacacggaccgcttactccgctctgcctgctcgctcccactgtccccaagcccgccccgcccgcggcaagtgcgtgcccaggcgcagccaccggcgagatcaggagcgcagcgcccgcagcctgagggaaccggcgcagggcagcagcggctgcagctggattcgcgcgccccagcgctcagtggcggcggccgggacaccctgggcagcaccccgcaccgcagcaccccagactacgagcaatcgtgcccgtccccgccggggctggagggcgcagggccgccaccctgcaagttcgtgggcccccggccacccttatgagagaaggcgaagccgggcgaaggagcaggacgctcggcagcaggactcctccgcaagccccgcgggccctctgttcccgcgccccccgggcgcccaagaagcaaaatgcaaccaccgcgctacagctgagaggggaaggggccagcgccatccgctcgcccggaatccggtccccgcggcggctgcgcgtcccggccgcggcccctccggcccgggagtgagcagcagcaggaggagaggcagcggcccggggttggccggggctggggaggagggacgggacggagggagggcgcgggggcggggagggggccccggcggataaagatggcaatgtctctcatccaagcgtgctgcagtctggctctctcaacatggctgctttccttttgtttcgtgcatctgctctgcctggactttaccgtggccgagaaggaggaatggtacaccgccttcgtgaacatcacctacgccgagcccgcgccggaccccggggccggggcggcgggcggcggcggcgcggagctgcacacggagaagacggagtgcgggcgctacggagagcactcgcccaagcaggacgcccgcggggaggtggtcatggccagctcggcccacgaccgcctggcctgcgaccccaacaccaagttcgccgccccgacccgcggcaagaactggatagccctcatccccaagggcaactgcacgtacagggataagatccggaacgcgttcctgcagaacgcctcagccgtggtcatcttcaacgtgggctccaacaccaacgagaccatcaccatgccccacgcgggtttaatgtcttctcatgcccagcccctgaagctgatttcaccatgcccatattccctttcctcaggtgtagaagacatcgtggccataatgattcctgagccaaaagggaaggagatagtaagcctgctggaaagaaacatcaccgtgacaatgtacatcaccatcggaacccggaacttgcagaaatatgtgagccgcacttcggttgtgtttgtctccatctccttcattgtcctgatgatcatttccctcgcatggctcgtcttttattacatccagaggtttcgatatgcaaatgccagggataggaaccagcgccgactgggggatgcagcaaagaaagccatcagcaaactccagatcaggaccatcaagaagggtgacaaggaaacagagtctgattttgacaactgtgcagtttgtattgaagggtacaagcccaatgacgttgtccggatcctgccctgccggcatcttttccacaagtcctgtgttgacccctggcttctagaccatcgtacctgtcccatgtgcaagatgaacattcttaaagccctagggatcccgcccaatgccgactgcatggacgacttgcccactgacttcgagggctctctgggaggtccacccaccaaccagatcacaggtgccagcgacacaacagtgaatgaaagttcagtcactttggaccctgctgtccggactgtgggagccttgcaggtggtccaggatacagaccccatcccccaggagggagacgtcatctttactactaacagtgagcaggagccagctgtaagcagtgattctgacatttccttgatcatggcaatggaggttggactgtctgatgtagaactttccactgaccaggactgtgaagaagtgaaatcttgaaacgacaaatccagaagcaaagagatagtaggacccaagggaaaggaagggaagagtgctccaagacttggaccaggcacacacacacctccagatcaccttggcaactccagggcgctccgttcaagaatgctgacgaaaagcaatatccaaagtcttgtcaatcaggatgcagtttctccatcggtatggcagtctgtggccttggcagctgggaagttgaaagctgatttccactcctatgtccatgtagacatacacttcagaagctcctaaaacagagactgaaaggccacctttaggatttcttagtttcatttcaattctttccatgtctcatcattcttgtttttggcatgttgtttgatttctttggcaatttttttaaagattatttgtagtttactttccatctattcctttgtttttcctttgatgcactccagcttttgtataggtttctgtttagaagcaccagttcctgctatgatcagtttgtattccatctctgagatatgtggtcttgacctcccagcatgaagtgtgcatggctttgagaagtgcctcagcaccctgaaatggactaaggccagctttcattaagaatctaagttcttctaagtgggcctttaaaaaccccagctgccagagaccccaacactaagccctaaatctgctgaggccactgctggttattttaagccacatcacacttgcttccacttgccgggcttgattaagggcccacgtgacatgagaagggagctctagggaagccgtttcattcttctgggtcttacagtctttggctgaaattctgaactcagaagtcccctccaaggcatccagtctttggtggttgtagggctggttttaaaaccagataccacattttcttcctattgaaaacaaaatgccagttgcattggtttcccctgggctagaacagtttttttcttacctctgtaagtgggttctgtaaaaaatggaggctttagagaaaagccaatcatttttaagtccaatggcaaacatagtgggggctgcagtagcacctagcttttaccttaatttcgacacacttctgttgaatctcaccagaccatgtgggaggatttaggtgaatccctagcagattgcttcccagggctccctgagtgtgtccagataccaagtgaggaatgaggtgtgatttgctgtatcatttgaaccaaaaagtatgcagcatgagaatttgctagatcgtttatcctgactgaaatagacaaagtaagagggaaaggaaaagaggtatcaagtaaatactgaaacccaatggtgtttttaaactgtttctgtttttattcatcttttgtaactatgacagaaatgtgctattttttcagtgggcaattttgtaatatattcagactatccagatacagagatgactaaggtcattgatagcgtctctgaacaatcagacggatcaccttatctctacacagctggcaaacaccaggctgcggcttggattaaccaggaaagaaagcttttctcactgagttgtttttatgtattgatggggacttttccacctcattagactaatactcattcaaaaagagtttggttctgctgtaaatccttgccgcctgctgaaacatggtgtgcaggtcaacggagaatactagctgctcctttttcaccacctttaccaatttcctatttgatggtttgtaagtagacagtaaggcaaggcagatgattattaccctcagaaaggttgcatctccctaggagtccaatgcttcctgtaatgaaatccactctctatgtgtgggaaaagaggcagggaggaatgaagagagctctgaatcgagaatcctagatgaaccacacgctttactaagcctcggcttcttcatctataatgtgaagggtttaataacatgagtccccaagctcctctggctgtgggaccacagatgagtctttcagaggcaggatccatttttgcagatagctatgacttgtggcaatcaggcttcgtagcttggggaggtagagttacttgacatgtatcatgtaataacagcctttgagacttggcacaactatggtgctgagaatgaaaatctaaatgattgaagttttaagtccaagtaggagttggtttgttttgccttgtttaaaaattgctgttagtcacagagtttgcaatctctggataccttcaaatcctagctctcactgtgggattcttgatctcagaggtgtttatttttcacagtcagcataggcttgcgccactgactcctccttcagtcggctttgcccaaaacaaattttagtattactggtattaagtttagtccagtggaattagaaggataattcaatagcaacagaaatataaattatattccattcccagagagagaatgcgctttggattgtttagtcctctgattaacgagtattttctcttcctgccaagaactaggtgaatcaggaattgattgcatatgcaagccctggccacagctgcacttacaggatgcctcatagacgatgaggggtctgaaaggccaacccgaggctggcagatctgaccccaaggaggtcctgctgcaaaccccctgagcctttgccattcactacttaccaaagtttgtttctggaggattttcctgtagctttgatagtttaaaaaaaaaaaaaaaaagaaaaaaaaaaagcttaaccagaaagtttctctttcagaagaaaggggaacagcccttccttatagccttctttacctcccccaaagaagagactgacctggagacctggtagtctacagatgagtgtcagagggtgtgtgtaccctctagaagcaaatgcagactgtatgtgtatttgcagatgtgcatttttctatagcaagagtctagactagcactgtccaacagaaacgtaatgcaagtcacagacataattttaaattttctactagccacattttaaagtgtaaaaagaaacaggtaaagataattttaatcatgtactttaacctaatattgtttcaacatgtcactaatgtaaattaatgacatgttttacatgcttttgtgtactaagtcttctaaatccattgtgtcttttacactcacagcacctctcaatttggatagtcacatgtggctagtggctgccaattggacaatgcaggtctagagttcctccagtattctcacaagatcccccgacccttacaaaagaaaagaaggttaaaagcttaattacctccagggagaactggacaccacccaagtcgcctaatgagaggcccagaggtccatttattttgtagtgaataaagattcaggcaccctttttaaaatttctgcttgaactttctaaccatatcattgatgtccatgaccatttgttgttactcctctgaccagttgttacttaaaactcacacaaaccatgctgatttggtgctgaaacaaaattatacccctcacttctatggcaaaccctcggactgatatgtggcacttaggagccaaagagaactccagactgaaatcacccaactttacctcaaccccttcttcttgttcatggttggtgaaagtcctttcccagtgtcccccagtcccacagctgtagtgaaaactcacgaacttgggaggaaagaatgagaaatgcaagactttatgtggccttcttgaaaaagaatctttgggggcctgtgatcatccggtctctacttggtgaattatgaccacctccaacagccagcattttactccaagtcagcatccacctgccaccccaatgctatggggaagaaaaggagcatttgcattcactcaaaataatttagggtcacctttaggaactgctacctcctatgtggctagtccctttggaagagctgagccctgactatgaatacagcttttgaacattgacttaatctctagggttagatatcccctgcagtgtcaactctggtcatctacacagggagaggtagagtctggagaaggcagaaaattaaaagcggcaaaggtacctacccatttttgacatcacatggtaatgatcagaatcatggaggcaaagctctgtccaaaaatgttcattttgttttgttttgttttgttttcttgtttttaacatttccttcatcctggtgaaatatcctggaaattcatagatctgggtttggtcatttcaaagctcaccatgcccagtggccatttcagttactgccctgacatccctgaggctaccatactctcaaaaccaaatcaatgccagtgatctaacataggattctttcttatttatgagttttgtttagatggatatttttgcagagcataaaaaattaaatgacatttagttatccattgaatgtatcaccctgacttaaaaaaaaatccttaaatcaaaacttttcaaaaaatctgggctatggagtcactccctctgtggagcgagagcccagtcttttctggtactaaggccacagaggcaatttccagtagcatttttatatcttctctaagtttcttttccttttctgtctgtatctgtttttctctgactgcctatatcttactttgtatacccatacataaattattttcccatcttctctcttcccctttttttctgatttgttttctctcttgcaagaaactctgaaataaccttcagaacacaaaaaactggaggttctatacctacagagtcattatcattattgtgattaccattgttactgttgttggtgtttttcctctttttattgtgtagcaatatccatattcacttctgatgaggcaaacctgtttactataaaccaatgtcctccctaaaggagtcagtttcattttcacttctcacatcaccagttgtatcgcaacccatcttacaaccattgccatgttttcaggcttccttgccataaatgttttctgggcaaataatggcaaagcaacaattccagaatgctgtctagatctgctttctcccaccctcagcatttgaccctcctcattcgcctgagcccccagggttaggatttcttggaaaaacttgtatactgtacctgatggaatgcccattcttcctaactacttagcacaagtgcttgctcatcgtaagtgatctgagggccactaattcctgaagactgacaaagagacacgaagagactaccctcttaagatggggatgcatggttcttcatgcagtgctcttggccaccgaggtccttcatccatgccattgcatggatgaatacgtttgatgttggcagttaaaatgggatgggagtgtcaccctgcaggaagtaagaaaagaggatggcaggatctctgatcagggagctggtcaaagcagggctggaaagcttctgtgcttaacaaaatgtgcgtgctgtccccaagtaaatgctcatccctaggtttagagctgacctgggttttggggagtttgtatttttaaggaattaaatactcatgagttaaaatactcatgattgcaaagaaggtctggattgcctgaaaaataaattaattctaagaagctaatatgagtttctcatcatcccttagctcttccttttccctccttttgtcctcactcaaccccagaccctgtgtaataggaacattaatttttaaagacccacagatcaatagccacactcttccactctacaccttttattgacaccaagttatcatcccagaactaatgaagcaagtccagatgctagacgtggccccttaatatcgagcaatttgattgcaatcctgcttgttctacaagaacctgctaaggtcagtcacatctctcttcacctgccttgagtgcttcataatcacgtggctttttcaggaatttcagtgatcaaagatcttctaattctgtgctaccactgacgtttgcacttaatacagagccatttgctctgtggccacctgataaatatttgctgatgataagacaaaaatatacacgtctattaagaggtctgcaatgtctgaacacagtgagggagaaaaatccttagagaaggtcgcttaatctcaattacccaaagtcattgcttggcagaatatctgtggtctgttatccttagtgaagtgacaggcttggagaagcagggtaatgtggggaccatgtgtgctatataaaccaaagactgatcaccatccaaatgaacacatgtttcttccattgactagttgaattttctcccaatgttctcataaataaaagcgaaggtgggttgcatggttgaatgaaaccattaaaccttatggggttttctgttgcagactgttgattgaccttactaaatcccgaaatctaaaaaatgaattgtggccttagtaccacaccatctttaaagtctagtgtttagtccccttttccttcaaaactttccaacaaatctagcgctttactgaactcagaacattgttctctttgagaatgtgaagattttaaatagccaaagaattttcatgtataagagctagctaaatatagtatatcctgctctttcgaagaagatacaaaactgttgcctgtactaatgggtatagtagagcagttgaagaactaacacatacatggacttttcggtctgaatttgtgttggcatccatggtacttactgttcagtaggatgttattgcaaggagcagagtgccctctgctggagtaatcgcaattattcttgcagcagattaatttgacttgggtcatgaattcaacaaccagttacttgcctttcatcatacaatttcttcggtagttgagaatttggtctacatttatcaaatgaggaaagagtgtcacaaactctaaaaagctgaaggagaccccacagatcttctcactgtcagcagcccttacttctgcaaaatgttgaaggataatgttgctctgtttgcaaagaagatgcctctggctagaatgtttgtgcagttataagcaagggactgcttgtttttgtaagttatctcaactttattcttgtgaaattgcaaaggaagatcaataaaaagacttcatatgaatgtaaatggtgtgaaatactgatgtgttttgtacatgtacataatatatttacttcctgctttcacattagtaatctgagatggttctaccattttataattagaaggagatgtaggggtgggagtggggagggactgttatttttatagaggggtgtcccttacatttagaaaatgaaataattttgtatttgtgaaaagttacattccatccattttctggaaaaaaaaatgggtattgttctttaaaatgttcatgagctgggaggatgattattctggtttccaggggaaactctcaagcagtacatatgtgatactcagttttgtagactgcagacaataaccagcaattgccagttgcaaaaatgtgaaaaagaaataacttattttaaccactttgtacagcatattatttcccactagaaaaaaatctgcaaataatgaatttacaattataaataatcagacatgacatcataaatcaatcttcctccctactagcaagaggaaattccaatggctttttttccatcctaacacaaattacttttattgtaaacaaatgcttgcaacaaaatgcttttgttgtaaaatgattgatgttggggtaaagtctacttagcttccccacaaggtctttctggctagtctgcaggtagtagatgatggttccatctcggcattgtctatcctctccatattcagactgtgtgactgagcttccttgatttatatagcatctgacccaaaatcacaaaaaagtcactcctgatgacatttgcatggggagtctttcatttggacttcagttcttaattgccgaaataagtactagtgaattatgtagcgtttttacccaaaactaatcttctgtacaaagttgtgtgcatattgagatgattagttaaggcagtgtagttttttaaattttttctgtataaatttctttccttcttccccacctcaggcacctaccctactcctttcagagcactttatatccctcttgaaatacaaagaaattgaaaaaaaaaaaaaagtaactgtctttaaaggaatttgtcttctattaggagacacagacttttattttgctttattctattctctttgtacttggagagcgtaatcaacttgtctcataatgggctagtgatgaaacaagggtgatagttggaaacagtcattacaacatggttatttttgttatatagaagactatcatgtaaataagtgcaatcgtgttcttacgtactggctaaaaaaaaaatattgcaactataaggatttttaaatgagggttgtgaattccaggaaatttcactgcaaaatttcttttggttttgttttttaataaaatggaaccaga

SEQ ID NO: 90 - DNA, 845 bp, Homo sapiens
agcacacacacatctgcacctcaaccacagactacacttgctgaactggctcctggggccatgaggctgtcactgccactgctgctgctgctgctgggagcctgggccatcccagggggcctcggggacagggcgccactcacagccacagccccacaactggatgatgaggagatgtactcagcccacatgcccgctcacctgcgctgtgatgcctgcagagctgtggcttaccagatgtggcaaaatctggcaaaggcagagaccaaacttcatacctcaaactctggggggcggcgggagctgagcgagttggtctacacggatgtcctggaccggagctgctcccggaactggcaggactacggagttcgagaagtggaccaagtgaaacgtctcacaggcccaggacttagcgaggggccagagccaagcatcagcgtgatggtcacagggggcccctggcctaccaggctctccaggacatgtttgcactacttgggggagtttggagaagaccagatctatgaagcccaccaacaaggccgaggggctctggaggcattgctatgtgggggaccccagggggcctgctcagagaaggtgtcagccacaagagaagagctctagtcctggactctaccctcctctgaaagaagctggggcttgctctgacggtctccactcccgtctgcaggcagccaggagggcaggaagcccttgctctgtgctgccatcctgcctccctcctccagcctcagggcactcgggcctgggtgggagtcaacgccttcccctctggactcaaataaaacccagtgacctcaaaaaaaaaaaaaaaaaaa

SEQ ID NO: 91 - DNA, 1516 bp, Homo sapiens
aaatactggggccagctcaccctggtcagcctagcactctgacctagcagtcaacatgaaggctctcattgttctggggcttgtcctcctttctgttacggtccagggcaaggtctttgaaaggtgtgagttggccagaactctgaaaagattgggaatggatggctacaggggaatcagcctagcaaactggatgtgtttggccaaatgggagagtggttacaacacacgagctacaaactacaatgctggagacagaagcactgattatgggatatttcagatcaatagccgctactggtgtaatgatggcaaaaccccaggagcagttaatgcctgtcatttatcctgcagtgctttgctgcaagataacatcgctgatgctgtagcttgtgcaaagagggttgtccgtgatccacaaggcattagagcatgggtggcatggagaaatcgttgtcaaaacagagatgtccgtcagtatgttcaaggttgtggagtgtaactccagaattttccttcttcagctcattttgtctctctcacattaagggagtaggaattaagtgaaaggtcacactaccattatttccccttcaaacaaataatatttttacagaagcaggagcaaaatatggcctttcttctaagagatataatgttcactaatgtggttattttacattaagcctacaacatttttcagtttgcaaatagaactaatactggtgaaaatttacctaaaaccttggttatcaaatacatctccagtacattccgttctttttttttttgagacagtctcgctctgtcgcccaggctggagtgcagtggcgcaatctcggctcactgcaacctccacctcccgggttcacgccattctcctgcctcagcctcccgagtagctgggattacgggcgcccgccaccacgcccggctaattttttgtatttttagtagagacagggtttcaccgtgttagccaggatggtctcgatctcctgaccttgtgatccacccacctcggcctcccaaagtgctgggattacaggcgtgagccactgcgcccggccacattcagttcttatcaaagaaataacccagacttaatcttgaatgatacgattatgcccaatattaagtaaaaaatataagaaaaggttatcttaaatagatcttaggcaaaataccagctgatgaaggcatctgatgccttcatctgttcagtcatctccaaaaacagtaaaaataaccactttttgttgggcaatatgaaatttttaaaggagtagaataccaaatgatagaaacagactgcctgaattgagaattttgatttcttaaagtgtgtttctttctaaattgctgttccttaatttgattaatttaattcatgtattatgattaaatctgaggcagatgagcttacaagtattgaaataattactaattaatcacaaatgtgaagttatgcatgatgtaaaaaatacaaacattctaattaaaggctttgcaacac

SEQ ID NO: 92 - DNA, 3792 bp, Homo sapiens
ggcaaacagcccgcccggcaccaccatgctcgccctggaggctgcacagctcgacgggccacacttcagctgtctgtacccagatggcgtcttctatgacctggacagctgcaagcattccagctaccctgattcagagggggctcctgactccctgtgggactggactgtggccccacctgtcccagccaccccctatgaagccttcgacccggcagcagccgcttttagccacccccaggctgcccagctctgctacgaaccccccacctacagccctgcagggaacctcgaactggcccccagcctggaggccccggggcctggcctccctgcataccccacggagaacttcgctagccagaccctggttcccccggcatatgccccgtaccccagccctgtgctatcagaggaggaagacttaccgttggacagccctgccctggaggtctcggacagcgagtcggatgaggccctcgtggctggccccgaggggaagggatccgaggcagggactcgcaagaagctgcgcctgtaccagttcctgctggggctactgacgcgcggggacatgcgtgagtgcgtgtggtgggtggagccaggcgccggcgtcttccagttctcctccaagcacaaggaactcctggcgcgccgctggggccagcagaaggggaaccgcaagcgcatgacctaccagaagctggcgcgcgccctccgaaactacgccaagaccggcgagatccgcaaggtcaagcgcaagctcacctaccagttcgacagcgcgctgctgcctgcagtccgccgggcctgagcacacccgaggctcccacctgcggagccgctgggggacctcacgtcccagccaggatccccctggaagaaaaagggcgtccccacactctaggtgataggacttacgcatccccaccttttggggtaaggggagtgctgccctgccataatccccaagcccagcccgggcctgtctgggattccccacttgtgcctggggtcctctgggatttctttgtcatgtacagactccctgggatcctcatgttttgggtgacaggacctatggaccactatactcggggaggcagggtagcagttcttccagaatcccaagagcttctctgggattttcttgtgatatctgattccccagtgaggcctgggacgtttttaagatcgctgtgtgtctgtaaaccctgaatctcatctggggtgggggccctgctggcaaccctgagccctgtccaaggttccctcttgtcagatctgagatttcctagttatgtctggggccctctgggagctgttatcatctcagatctcttcgcccatctatggctgtgttgtcacatctgtcccctcatttttgagatcccccaattctctggaactattctgctgcccctttttatgtgtctggagttccccaatcacatctagggctcctccaagatccttttgtcatgtctgaaatcactcttgagaggtctggggtggaggatggggagtcagtgaaatgtgtcatgtctgggccctgtcagggacacccttgttatatctgggatcctccaatcacatctgagacctcctaggctctccatctgatatgccctttcagggaccccacaaagactgagttctcatggggatcctacccttcctagtgccactccctatggccatgctgaagaccactctggccacgcgactgattttgggtgatcatggcagctccccacccatgtcatttctaaccagaagtctcaaggtcgtcacccccctgccccccaaccgaggccccggtcgctggtggtggtctctttagtgcactgtagcacttggtggtggaggtgtgagggatccacattaacagcaggccatcagctgggcaatggctcacacctgtaatcccagcactttgggaggcgaggcagggggaatggcttgaacccaggcattcaagaccagcctgggcaacataatgagacctcgtctctacaaaacataacaaaaacaattagccgagcgtgggggtgaacacctgtggtcccagctgctcaggaggctgaggtgggaggatctcttgagcccaggaagtaggaggctgtagtgagctgtaatcgtgccactgcactccagcctgggcgacagagtgagacaccgtcttaaaaacaaaaacaaggccgggcacggtggctcatgcctgttgtcccagcactttgggaggccgaggcaggcggatcacgaggtcgagagatcgagaccatcctggccaacatggtgaaaccctgtctctactaaaaatacagaaattagctgggcgtggtggcacgtgcctgtagtcccagctactcgggaggctgaggcaagagaatcgcttgaacgtgggaggcagaggttgcagtgagcctagattgtgccactgcactccagcctgggggacagagcgagactccgtctgaaaataaaaacaacaaaaacagcagaccattcaaaatagggagactttgcataatccagatttctgccttcacttaaaactttggacggtctggagagagtcggccagttttcggtggggggtggggagctggaacaggacagtagcctttcctaatgaggcatttgttctccaatctgccccagtcgctgccatccctggctatctcaccctagcagcttctcaagcctgttggctttagaccactgtataaacccagctggaactgaagcctgggtggactatggagccctggttgggacccccagggagtcaaaggctgcgggccaagaggccagaggtccttgagcctgggtgggcaggtggatctagggtgcatgacttgctgcttcccaaccttagtttgtcccttctgtgaaaaagggagagaaggaggaggaagatctcaaaaagactttccagcccagtgcggtggctcacgcctgtaatcccagcactttgggaggccgatgcaggtggatcacctgaggtaggagttcaagaccagcctgaccaacatagtgaagccccttctctactaaaaatacaaaattagctgggcgtggtggcatgtgcctgtactcccagctacttgggaggctgaggcaggagaatcgcttgaacctgggaggcggaggttgtagtgagctgagatcacaccactgcacaccagcctgggcgacaagagcgaaactccgtctcaaaaaaaaaaaactgttgcagccccgttgagcctttgacaccgcctgaaatccaccccactcccaggaggaggaggaggaaggaatgccaatgacctagagacacgagaagtccatgtggaggcacacagcagctgatggcagagcccaggctgggacctgcccttaagagaatgagtgggaagggggagggaggaagggcaggtaaaacgtcctccccagggccccctgcaacggggaaggtactttttacaaaagctatcattgtcaccctaaatgtggaataaaataagatgcatcgacgtagacaaacctcctgggaccttttgtcagggactgcaatcctgcccctccactgaggccgctggctctcagagacaccgtgacatcacgggtgatgatgagaggagttcaaagagagaattatatgctggcgcggtggctctgtaatcccaacactttggggggccaaggcaggaggatcgcttgagtacaggagtttgaaaccagcctgggcaagatagtgagatccccttcccacccgtctacaaaaaaaataaaaaattagcgggg

SEQ ID NO: 93 - DNA, 3783 bp, Homo sapiens
gcatactgctagtggcgcgcggaggagcgacgcgtggagaagcggcccacgtgtctgcccagagtcaagtcctgtgttcttcccgctccttacgcatccgcggtccagggcgccctttcagccccgctggtgttcgcccaccccgggccgcgtgagtggggccccacgcagctccccgcactccgtgggccaacttggccaagcaactctgtccggggagcggtgcttgcggggggtgagtaccgggcactgcgcatgcggagctccaaattcaaacagctgttttcagaggctggagggcgggcggactggtagcagctggggctaggagaggctttctctaggaggcggccgctcgggagccatggtggaccggggccctctgctcacctcggccatcatcttctacctggccatcggggcggcgatcttcgaagtgctggaggagccacactggaaggaggccaagaaaaactactacacacagaagctgcatctgctcaaggagttcccgtgcctgggtcaggagggcctggacaagatcctagaggtggtatctgatgctgcaggacagggtgtggccatcacagggaaccagaccttcaacaactggaactggcccaatgcaatgatttttgcagcgaccgtcattaccaccattggatatggcaatgtggctcccaagacccccgccggtcgcctcttctgtgttttctatggtctcttcggggtgccgctctgcctgacgtggatcagtgccctgggcaagttcttcgggggacgtgccaagagactagggcagttccttaccaagagaggtgtgagtctgcggaaggcgcagatcacgtgcacagtcatcttcatcgtgtggggcgtcctagtccacctggtgatcccacccttcgtattcatggtgactgaggggtggaactacatcgagggcctctactactccttcatcaccatctccaccatcggcttcggtgactttgtggccggtgtgaaccccagcgccaactaccacgccctgtaccgctacttcgtggagctctggatctacttggggctggcctggctgtccctttttgtcaactggaaggtgagcatgtttgtggaagtccacaaagccattaagaagcggcggcggcgacggaaggagtcctttgagagctccccacactcccggaaggccctgcaggtgaaggggagcacagcctccaaggacgtcaacatcttcagctttctttccaagaaggaagagacctacaacgacctcatcaagcagatcgggaagaaggccatgaagacaagcgggggtggggagacgggcccgggcccagggctggggcctcaaggcggtgggctcccagcactgcccccttccctggtgcccctggtagtctactccaagaaccgggtgcccaccttggaagaggtgtcacagacactgaggagcaaaggccacgtatcaaggtccccagatgaggaggctgtggcacgggcccctgaagacagctcccctgcccccgaggtgttcatgaaccagctggaccgcatcagcgaggaatgcgagccatgggacgcccaggactaccacccactcatcttccaggacgccagcatcaccttcgtgaacacggaggctggcctctcagacgaggagacctccaagtcctcgctagaggacaacttggcaggggaggagagcccccagcagggggctgaagccaaggcgcccctgaacatgggcgagttcccctcctcctccgagtccaccttcaccagcactgagtctgagctctctgtgccttacgaacagctgatgaatgagtacaacaaggctaacagccccaagggcacatgaggcagggccggctccccaccccacctttgatggcctcttcccccctcaccctagggtgtcccgagatgaccgggacgcctggcccctggtgggggggcagcctcggaactgggagtggggggccaggggccttcctaaccttccatcatcctcagctagatgtatgcccgggacagggcctctgttctccagctgaaccataccctggctgtgggggcatctgtcctgagcttggctggtgtatctcacaatgcaaagacatgctggctggcgggacaggtgggcaggactgaccctgaggaggccttgcctgcagggtctttgtctcaccatttggtggagtatcacacggttctctgaggtctggggcctcagctgtttaagtttaccggtattactgagctcggcatttggagagggagctctgaagtgtctggggaggtaccgctgtgcgtggggtcaggtgtttccgtaccacagcaggagcagggcccgcccgcatcccagctgtgggcctgccggtcaggtcgggcacctactacaaaccgtagtggggtggaggctgctggaggtgggagtgaggagatgagggcagggtctcaaacagtcctgactcacagggcctggaaacaagtcctatgtgggcctggggcctggggtcctcatcctccttgttggtctactcaggcccagcccagagctgtgttccctgtctcaggtcaagcagtggcagacgcaaggctttctgtgggcccccaagtggtaggagggagagtagcagagcatgggttactggaagccgggactgctagggctggtggccagggagctgcaagagtgaggctcagctctggctggttctgcccttacccctcctgcccgcctgagaactgcacaccctgcccgctggccccaggacctgcactcccaatcctgctgtcttctccttccctgtgccctgaacaaggacctcactgcccgccttcccctcccaccagcccccttgggccaggcagggtgaggccaaattgctcttggcccacaaatgggtgatggtcagatatgtgaatcaagctcctttctctagctagtgtttgatgtgcacgtgtgtgtgcacagtgcgtgtgtgcacacgcacacctgtgcactcgtgtgtgtttaagaaaggaaaggatttgggctggggagcaaaagataatgtgaaactgttggtggactctctggtgaggggtgggcagaacttgctgctactagagttcttgggttctccatgatgttcaccctggggctggcccactgtgtcctgaatgtttttgttattttttgttttattttttaaacaaactgctgtttttatatacctggaatctgttgttggcttcagagccagtggttaaagagcagggtcccaaggattgggagatctagtgtctgccctcctgccctgcaactcaattgggcctttttcggtgacctcatccaaggccatgatgtcaagggccatgtccccaagcagaggtggagaaggggacactgaggtgagcaaaagcaggaaggggcatccactgcgggtgactggaggccgggcaggaagcaagtcatcagagccgctcagctccgttcactctctgccttctgccccactactgtggggcagtggggccagagcccacctccccaacatgtgaagacagtgatgggcacgtgcccacacccccacttctctagccgtttgcagaggccgccacccagcaggggcctgaaaaggagcagcctcgtatttttctgtgaaatgttttaatgaaccatgttgttgctggttgtcctggcatcgcgcacactgtatgtacatactggcaacgatgtcaaatgtaatttattttaacatttttacaataaaacatgaggtggacaggcca

SEQ ID NO: 94 - DNA, 780 bp, Homo sapiens
agtgagcattctcagcacattgcctcaacagcttcaaggtgagccagctcaagactttgctctccaccaggcagaagatgacagactgtgaatttggatatatttacaggctggctcaggactatctgcagtgcgtcctacagataccacaacctggatcaggtccaagcaaaacgtccagagtgctacaaaatgttgcgttctcagtccaaaaagaagtggaaaagaatctgaagtcatgcttggacaatgttaatgttgtgtccgtagacactgccagaacactattcaaccaagtgatggaaaaggagtttgaagacggcatcattaactggggaagaattgtaaccatatttgcatttgaaggtattctcatcaagaaacttctacgacagcaaattgccccggatgtggatacctataaggagatttcatattttgttgcggagttcataatgaataacacaggagaatggataaggcaaaacggaggctgggaaaatggctttgtaaagaagtttgaacctaaatctggctggatgacttttctagaagttacaggaaagatctgtgaaatgctatctctcctgaagcaatactgttgaccagaaaggacactccatattgtgaaaccggcctaatttttctgactgatatggaaacgattgccaacacatacttctacttttaaataaacaactttgatgatgtaacttgaccttccagagttatggaaattttgtccccatgtaatgaataaattgtatgtatttttctcta

SEQ ID NO: 95 - DNA, 4993 bp, Homo sapiens
gcagcagcgattgcagcagttgctgccgctgcgccgcgcctgaagccgcgccgcgcgggccgagggctcctgcagctgctcgcgcgcagtcggaggcggagaaggacgaagactgagactgacacttctgctcccggccgcccggcacttacgcgggggccccccaacccgccccagagcaacgcgatttaaaaaaaaaaaaaaagccgcccttagccccctcctcccctttcctgcttctgcgagaactccctccctccctccagctccgccagcccaggcgccccttccctggaagccgagcggcttcgctcgcatttcaccgccgccgcctctcgcaatattgcaatataggggaaaagcagaccatggtgaatccgggcagcagctcgcagccgcccccggtgacggccggctccctctcctggaagcggtgcgcaggctgcgggggcaagattgcggaccgctttctgctctatgccatggacagctattggcacagccggtgcctcaagtgctcctgctgccaggcgcagctgggcgacatcggcacgtcctgttacaccaaaagtggcatgatcctttgcagaaatgactacattaggttatttggaaatagcggtgcttgcagcgcttgcggacagtcgattcctgcgagtgaactcgtcatgagggcgcaaggcaatgtgtatcatcttaagtgttttacatgctctacctgccggaatcgcctggtcccgggagatcggtttcactacatcaatggcagtttattttgtgaacatgatagacctacagctctcatcaatggccatttgaattcacttcagagcaatccactactgccagaccagaaggtctgctaaaaggtcagagtaatgcagaatgcgtgccttcatctcagatttgttcatcacaggtggatcccatgtgtcttcagtagacaagtcacctttgtagctagcaccagtgccagctccatgccattgcaccttctttagtcttgattgcccttcccgcatttattggtgtattaaaatgactgaatatgaacattaaggactccatgaacctgggctaatgggagactgtagagaaaatgaaaaaagatccaccagaggacatcttggggagggggagggagctgggggggagggaaatgactaatgaagctaattaaaagaagcattcaaatctgctttctaccctcattaacaattagcagggcactggccagagtttgtaccctgtgttttaccttaacaacattctatttgctctttgtatatttaagtgttgtaaggaaacgtgtttcaatcaaaactgaccatgagataaaggaaagagatgtggcttttgtgatattctatcacaaacacttattgtatctctgtaaaatacaatgtatgtatgcatgtaagtgtttttgtcctaatgttgctactcccatggcaaagaaaaaaaaaagaatgaaaaaaagaaaaaaatttggaaaaaaaaatcaggctcatagcagctactgtgtagaaaattccccctacttctaatttgctgaatgaagaaaaaaaaaaatcttttatttgtgatattttcagagacatttgctctagtatggtgtatttaaataataaaaacttaaaagaaaaaatatttaatggtgtttgggtttaaacactgctttttctcttctgtattttgaagaaatttagtttttattgttgttgaataacaagctcactttaaatttgaaggagttgagggaggtggagtgtatatttatttagctctgggccagtaaggtattcttcaaattacttaaccacgccattattggcaggggtacaaagtagtttctaacagggtcctttctataagtcaagaatattctgttaacagcatttcgttacacttctatatcacagtaagtcttttgtgtttataaatacttgagtgtccactattttgtttattctttttctcaatagcaaacaaagccttgggtattgatgaaaagtatgtataaaaaaaaatacggcacaaccatcctgttctcttattgagtttatagcttttgaaggaagtcacaatttctaagtcatacctgtacatattttgaagctcacttagttgtagggacccagagctctttttttatggtgatctttgattggtgaagtagccatttcctggtgacccttaggctcgtgtggttggctgtaaggtgtttattttgttttgctcctacacttctttactgactgcgtttccgtatgtattttgggggaagattctgacttcatttagtcttagtcttgagatactgagttgctggttgcaggcagcagagtgtccaccacagtgcctgcactgcccgcagagctgccctccggaaagcatgcagtataacagctagtgctggaaggaggaaaaccaaataggcctggaggctgaggttgtactgccagcttccttagatgtgagcaaatttcaactacaacttccatcacaggctaataaaaccaggtgtgtgaacgctactattttaaattttcttttttaagatggcattttattttgttccagaaaagcgcctgatgtagaccctccctctgagaatagccgtggagccatgtagagaggtgtagctcagcacatctcaactaccagtcagcttccctttgagaacttctgtgctcacttcctgttttcagagattccagggcaggggaaaaaaaaaatcagttgaacttcaaacctcctagaggagattgtaaaggcatagagttgaggtgaatagttttgttagaaccttataaaaataaaatgcaagaaaataatatgaagaaatcacatatatatgtttgaattagatgtctgtttgaattagatccttggggaatttcttcaaactagttctggttcttatatttgttttttttcctttaaggaactttctgaaggaagttagactgcgatggtaaagggggaaatgggttaatgagattgcaggcattttctatattctttttggcataagcacttatgtccctgatatgtacaaattcaaaggaggtggttaataactttagtaaataatatattgtcgcatttaatgatgtggagggctaaggtcattacggactttaaataaactattatatggctggttcctcaagcactgctgcgtatttaataatgagcttctaaaagcatttcttaagttgcagacctataagattacaaatgtcactcatgttagtataatccacatgcaagtgatgaagccttctctttgatgtgctaaattggagaaggactaatggagctatgaatatacaatagaacatatttaagtagtagtcttgctttaggtaaaacactttcttgaaaccagaggcatttcaaacaataaaacccggctctaatggggatgctctgtgtggatagaaagctactaaaaacactcaggtttattctgatgtgagcagcgattgtgtgcagttcctcccccaatctcaacattgcttaggaaaaaaaaaaatctatgagtttattccacctttcatccattgcatttgtgatgttattagttagcaagatggacactgttctttagaaaggacttatttaatattaaccacgtcatagagcaagatggcccccagtccctacaagcaagtgcaattaaaaataaaagcaaatgttactgagccctgctgaactcctgataaaaaaaattatgtttatggtacatataaatgtctcaatcatgcaaattgtcactcttgttaatgaaacaattttgtaaaaagatagtcctctaaaagggtttaatgttttttacctatctaactgtctaattagatttacacatcccgcaaggcaggggagcctgaagcttttccaaaccaaatcgtttgccactagaaactattttcagctcttcatgatttattaggaaatagtttaacccggactgtagtgtcttataaaatacaaaacgagaaaactgacacaccaaaatgaagtctgtgaaattgtcatcctcttaatattacctgtatttaaattctttcttttgcccttattaacactgatatttgaaacaactaatcatctaaaaggaagctcttaaagggctttaaatgtcaatatagtaagattctaatgtgcactactatttatataaaatatttcttagggcccataaatcatataataaacagtgaacccaagagctacatatggagtctagtgaagagttcccatgtagcctaactaattgtatttaaattgaggagatccaaaaaccccatcacccttcaccccaaagaccccttcacccttcaccagggaattctatcctgggtgctgtcccacctatgaccccttcaagaggccattggaaaaaggccatttacaagttaatgttacttatagctttgttactaagactcacctattgttagtgcagccaagtcacagaagtgcttattgcagttaaatagcaatttgtttccatgaaactgcaattaaagtattactgagcagccattttagattggcagtgctctgaacgcatgttaaacagccagctactcccacttgcagagtctgagatctgactagcagcaaagtgtagcacattcgccgatgctgggtacctagttaaagaggcatttgtagccctctgctcccatcgtgaacatgctgagagcaatgacaagtcagggctgatttttggaaggtgaacttgcaacttacctcaagtgaatactgttttcagttgtgcaagaagtgctttatgctagtagatatgtgcatgtttcctagagggaatgttttcaagttcagattgattctgctgagaatggacggcaactcggaggcctcaagccaataatgtactacaggccctgacatgttacagctgtgtaaacagggccattctatttcctaaatcacaactaataaagcagaggatgaaaatcaa

SEQ ID NO: 96 - DNA, 1560 bp, Homo sapiens
cttagaattgtagaagctgctcaatatggaacatattctcagtcctcctctggtctacaaagcctgtgatttcttgtctatggacagaacgtctggtttaatctacaggaacccataacttcctgaagctttatgcttaacagtgacaacgtgagtcagttgaattttattgtgtttcagtccgtagagtattagctacagaaacctttccattgccatactgagaaactgcagcaggcagtgtgcctacaggtctacaaagaaacttcagatcatcttcttgagggaaagaagctgaagtgctacataagatgcttgtgcttcataactctcagaagctgcagattctgtataaatccttagaaaagagcatccctgaatccataaaggtatatggcgccattttcaacataaaagataaaaaccctttcaacatggaggtgctggtagatgcctggccagattaccagatcgtcattacccggcctcagaaacaggagatgaaagatgaccaggatcattataccaacacttaccacatcttcaccaaagctcctgacaaattagaggaagtcctgtcatactccaatgtaatcagctgggagcaaactttgcagatccaaggttgccaagagggcttggatgaagcaataagaaaggttgcaacttcaaaatcagtgcaggtagattacatgaaaaccatcctctttataccggaattaccaaagaaacacaagacctcaagtaatgacaagatggagttatttgaagtggatgatgataacaaggaaggaaacttttcaaacatgttcttagatgcttcacatgcaggtcttgtgaatgaacactgggcctttgggaaaaatgagaggagcttgaaatatattgaacgctgcctccaggattttctaggatttggtgtgctgggtccagagggccagcttgtctcttggattgtgatggaacagtcctgtgagttgagaatgggttatactgtccccaaatacagacaccaaggcaacatgttgcaaattggttatcatcttgaaaagtatctttctcagaaagaaatcccattttatttccatgtggcagataataatgagaaaagcctacaggcactgaacaatttggggtttaagatttgtccttgtggctggcatcagtggaaatgcacccccaagaaatattgttgattgattccactgtccatttcaaatctttcttatcagtaaaaaaacattaattcaaacacaagcattgtgatctacattagcacaaaatgcaactgattatctaggatctgtgtattacttaagctcacccttaacagttttaccttccttctcctctgtattcttacagaaaattagaagctcaattttatggtctcataatttcctttatgacagacatctcagaattaaaatcacccaaagccaatcattagtgccaagataaccctttaacggcaacactttcttaaatgaagactatttctttcatgaaaaaattcacttttatgactttcttgttaaaataaaaagtctgcttttaaaa

SEQ ID NO: 97 - DNA, 2621 bp, Homo sapiens
aggaggagctgggtcacagcagggaatcttagcttggttttggtgtgctgctggatgaccagaccgggcgtcgggtgagcccagaagtgagagcagttggctgtgccccagtgctgtgtgacccagaggcgccgctcaccctctctgagctggtggacatcatagcgggtgcagcccagaactgtcttctgaggaagaggtgctctcctgggcccccactgtccccaggcctcagatgctgcatattgctggcccagctcctgaggctctttggacctccaggaatcggtgtctctatcaggaacccttaaccctgacccggactcccagctgggacccggggtgtcggagtggcaagagcgctgtcaggcctggtgaagggtgtgagctgtccaacggggcagggaggaggcagggcctgttctgcagttggacagacagagccctctagctgctttctggaagactgaagggcagcaaggcaagtgaggtgctgccgtcatccaggctggacagttcagtgatttgcctgaggccccacagcaggagaacgagaaggctgcctgatcagagagtccctgaagaagattctgtggctacaggcttcagcagagtgtgagggagaccccggttatttcctcagctatttccaccaaatcctcctgtctttcgtggccaacaccccaggcaaggcttggggcccccgtctgctgctggacgcagagccatgaagaagaagttagtggtgctgggcctgctggccgtggtcctggtgctggtcattgtcggcctctgtctctggctgccctcagcctccaaggaacctgacaaccatgtgtacaccagggctgccgtggccgcggatgccaagcagtgctcgaagattgggagggatgcactgcgggacggtggctctgcggtggatgcagccattgcagccctgttgtgtgtggggctcatgaatgcccacagcatgggcatcgggggtggcctcttcctcaccatctacaacagcaccacacgaaaagctgaggtcatcaacgcccgcgaggtggcccccaggctggcctttgccaccatgttcaacagctcggagcagtcccagaagggggggctgtcggtggcggtgcctggggagatccgaggctatgagctggcacaccagcggcatgggcggctgccctgggctcgcctcttccagcccagcatccagctggcccgccagggcttccccgtgggcaagggcttggcggcagccctggaaaacaagcggaccgtcatcgagcagcagcctgtcttgtgtgaggtgttctgccgggatagaaaggtgcttcgggagggggagagactgaccctgccgcagctggctgacacctacgagacgctggccatcgagggtgcccaggccttctacaacggcagcctcacggcccagattgtgaaggacatccaggcggccgggggcattgtgacagctgaggacctgaacaactaccgtgctgagctgatcgagcacccgctgaacatcagcctgggagacgtggtgctgtacatgcccagtgcgccgctcagcgggcccgtgctggccctcatcctcaacatcctcaaagggtacaacttctcccgggagagcgtggagagccccgagcagaagggcctgacgtaccaccgcatcgtagaggctttccggtttgcctacgccaagaggaccctgcttggggaccccaagtttgtggatgtgactgaggtggtccgcaacatgacctccgagttcttcgctgcccagctccgggcccagatctctgacgacaccactcacccgatctcctactacaagcccgagttctacacgccggatgacgggggcactgctcacctgtctgtcgtcgcagaggacggcagtgctgtgtccgccaccagcaccatcaacctctactttggctccaaggtccgctccccggtcagcgggatcctgttcaataatgaaatggacgacttcagctctcccagcatcaccaacgagtttggggtacccccctcacctgccaatttcatccagccagggaagcagccgctctcgtccatgtgcccgacgatcatggtgggccaggacggccaggtccggatggtggtgggagctgctgggggcacacagatcaccacggccactgcactggccatcatctacaacctctggttcggctatgacgtgaagcgggccgtggaggagccccggctgcacaaccagcttctgcccaacgtcacgacagtggagagaaacattgaccaggcagtgactgcagccctggagacccggcaccatcacacccagatcgcgtccaccttcatcgctgtggtgcaagccatcgtccgcacggctggtggctgggcagctgcctcggactccaggaaaggcggggagcctgccggctactgagtgctccaggaggacaaggctgacaagcaatccagggacaagatactcaccaggaccaggaaggggactctgggggaccggcttcccctgtgagcagcagagcagcacaataaatgaggccactgtgccaggctccaggtggcctccctggcctgtctccccactcaaaaaaaaaaaaaaaaaa

SEQ ID NO: 98 - DNA, 1805 bp, Homo sapiens
agcgccggctccgcgcctcgcgcccagtccgcgggccgcgccgccgctcccgccgctcccgccgctcccgccgctcccgcagccgccccgccgcccgcccggagccccgcgtccctaggcctggctcccgcctgcccgagacccgcccagcctgccccgctcagccgccagagaagatgcggctgctcccggaatggttcctcttgctctttggcccgtggctccttaggaaggccgtcagtgcccagataccagagtccggaaggccgcagtacctggggctgcgccccgccgcggccggagcgggtgcccccggccagcagctcccagagccaaggtcttcggacggcctaggcgtgggccgcgcctggagctgggcctggccgaccaaccacacgggggcgctggcccgggcaggggcagccggggcgttgcccgcgcagcgcaccaagaggaagccgtccatcaaggcggcgcgcgccaaaaagatcttcggctggggggacttctactttcgggtgcataccctcaagttttcgctgctggtgaccggcaagatcgtggaccatgtgaacggtaccttcagtgtgtatttccgccacaactcgtccagcctgggcaacctcagtgtcagcatcgtgccgccctccaagcgtgtcgagttcggaggagtctggctgcccgggcctgtcccccaccctctgcagtctacgctcgccctggagggggtgcttcctgggctggggcccccgctggggatggcagcagcagcggcggggcccgggcttgggggctccctcgggggcgcactggcggggccgcttgggggcgcgttgggagtgcctggggccaaagagtcacgcgctttcaattgccacgtggagtatgagaagacaaaccgcgcgcgcaagcaccgaccgtgcctgtacgacccgtcgcaggtgtgcttcaccgagcacacgcagagccaggccgcctggctctgtgccaagcccttcaaagtcatctgtatcttcgtctctttcctcagctttgactacaaactggtgcagaaggtgtgcccagactataacttccagagtgagcacccctacttcggatagcgcccctccccagccagtcctgagcctcccgccaaatcccagcctcactaggtgggacccccttcccagtgttctgccgctcctgtggccatgtcgcccactccttccactctgggggcggaggggaatggcttctcgggaccctcagctagcgtgggtgcccttttccttatgcggagtgcccgcaaggctggggtagccccctccagtacaccccaaagtgaaagggataagagtgcagccccagaataggcggggcttggaggcggtcccaatgtcccctgggtccacagtgggtccccttttcacccttggcgctaggctgcgcactccctttccccgcagctttaataactcctggcctggcaccctcaccccaccctgactttcccatcccccagcgcttgtcctgcttcaccctaccccgcctaagactgtaaaggcctaaaaacctcggcctgtcctcccaccattctgcctgccatatgcctgtccccttttcctccaaaccctattagggtaccggaagcagaacccctgggctgaggccctggccctgcccccggcccctgcccctgcccgcccccctccagtccaggcagtcgagctccacctgccctctcctgctgcttcctctcggtgatattttttctacgccaaaacagacgggaaagggaacaaaataaagtgaaatccaataca

SEQ ID NO: 99 - DNA, 4044 bp, Homo sapiens
aaaagcgcctgggaagagcaatcacaagttgtgacgattccaagttcacagaagcccaagggattttgacatttctccaaggagttagccagaagagatcctcaccggttgagttcagatggaagagaacagtaagaaggaccatcgggctttgctcaaccagggagaggaggatgaactggaggtgtttggttaccgggaccacaatgtacggaaagccttctgccttgtcgcatccgtgctgacctgtgggggccttctgctggtgttctactggagaccccagtggagagtgtgggccaactgcatcccatgccccttgcaagaagcagacactgttttgctgaggacaacagacgaatttcaaagatatatgaggaagaaggtattctgcctctacttatccacactgaagtttcctgtaagcaagaagtgggaagaatccctggtggctgaccgccactctgtcataaaccaagccttaataaagccagaattaaaactgcggtgcatggaagtgcagaaaatcaggtatgtttggaacgacctggagaagcggtttcagaaagttgggttgctagaagacagcaattcctgctctgacatccatcagacatttggattgggtctgaccagtgaagagcaagaggtcagaagattagtgtgtgggcccaacgccattgaggttgaaatccaacccatatggaagctgcttgttaaacaggttttaaatccattctatgtgttccaagccttcaccctaactttgtggctgtctcaaggttacatagaatactctgtggccatcatcattttgactgttatctccattgtcttaagtgtgtatgatttgcgacagcaatcagttaagctgcataacctcgtggaggaccacaacaaagtccaggttacaatcattgtaaaagacaaaggtttggaggagctggaatcccgtctcttggttcccggagacattcttattcttccaggaaaattttcattgccatgtgatgctgttttgattgatggaagctgcgtggtgaatgaaggcatgcttacaggagaaagtatacctgttacaaagacaccattgccccagatggagaacactatgccttggaaatgtcacagtttggaggattataggaaacacgtccttttctgtggaacagaagttatccaggtcaagccctctgggcaggggcctgtacgagcagtcgttttgcaaacaggttacaatacagccaaaggggacttagtgagatccatcctgtacccccggcctctgaacttcaaactatacagcgatgccttcaagttcatcgtgttcctggcctgccttggtgtcatgggttttttctatgccctaggggtatatatgtaccatggagttcctccaaaagatactgtgaccatggccctgatcctcctcaccgtgactgtccctccagtgctgccagctgccctgaccataggcaacgtgtatgctcagaagagactgaagaaaaagaaaatcttctgtatctccccacagagaatcaacatgtgtgggcaaataaacctcgtgtgctttgacaaaactggcactctcactgaagatgggctggacctctgggggactgtccctactgctgacaactgcttccaggaagcccacagctttgcctcaggccaggctgtgccatggagcccactgtgtgcggccatggccagctgccactctctgatccttctcaatgggaccatccagggagaccctctggacctcaaaatgtttgagggcactgcctggaaaatggaagattgcattgtagactcctgcaaatttgggacgtcagtttcaaacatcataaaaccaggaccaaaagccagtaagagtccagtggaagccatcatcaccttgtgccagtttccattttcctcgagcctgcagaggatgtccgtgatcgctcagctagctggggagaatcatttccatgtctacatgaaaggtgccccagaaatggtggccaggttctgcagatctgaaacagtgcccaagaatttcccacaggaactgaggagttacacggtgcaaggcttccgtgtcattgctcttgcccacaaaaccttaaagatggggaatctttcagaagtcgagcacttagccagagaaaaagtggagtcagagttaacatttctgggacttctcatcatggagaatcgcttgaaaaaagaaaccaaactggtcttgaaggaactgagtgaggcccgtatcaggactgtgatgattacaggtgataaccttcaaacggccattactgttgcaaagaattctgaaatgatccctccaggcagccaagtgatcattgttgaggccgatgaaccagaagaatttgttcctgcctctgtgacctggcagctggtggagaaccaagagactggacctgggaagaaagaaatctacatgcatactggaaacagttcaacccctcgtggggaaggaggaagctgttaccattttgcaatgagtgggaaatcataccaagtgatatttcagcatttcaacagcttgcttccaaaaattctggtgaatggaacagtttttgcaagaatgtctcctgggcagaaatcaagccttattgaagaatttcagaaattaaattattatgtgggcatgtgtggagatggagctaacgactgtggggctttgaaagcggctcatgcaggcatttcattatcagagcaggaagcatctgtggcatccccttttacctctaaaacaaccaacatccagtgtgtgcctcatctcatcagagaaggccgagctgctctggtttcatcctttggagtatttaaatacttgaccatgtacggcataatccagtttatcagtgcattactgctctattggcaactacaactctttggaaattaccagtatctcatgcaagatgtagccattactttgatggtctgtttaacaatgagttcaactcatgcctacccaaagctggctccatatagaccagcaggacagctcctttctccccctttactgctttcaatatttttgaattcctgtttctcctgcattgtgcagatcagtgcatttctctatgtgaagcagcagccttggtattgtgaggtctaccaatacagtgagtgttttctggccaaccaaagtaatttttcaacaaatgtgagtttggaaagaaactggactggaaatgcaactctgattcctggttcaattttaagttttgagaccaccacactgtggcccatcaccaccatcaactatatcacagtagcattcatcttttctaagggaaagccatttcgaaaacccatctatacaaactatatattttcatttctgctgctagctgccttgggcctcacaattttcattctgttttctgactttcaagttatataccgtggaatggagttgatcccaaccataacatcgtggagggttttaattttggtggtagccctcacccaattctgtgtggctttctttgtagaggattccatccttcaaaatcatgaactctggctgttgatcaaaagagaatttggattctactctaaaagtcaatataggacttggcaaaagaagctagcagaagactcaacctggcctcccataaacaggacagattattcaggtgatggcaaaaatggattctacatcaacggaggctatgaaagccatgaacagattccaaaaagaaaactcaaattgggaggccaacccacagaacagcatttctgggccaggctgtaatcagaattgtcgtcgtacatgctcaacagcattgcttttttccccaaaattaacacattgtggagaagtgatgatactctccccttacctttcctctctccattcaagcattcaaagtatattttcaatgaattaaaccttgcagcaagggaccttagataggcttattctgactgtatgctttaccaatgagagaaaaaaatgcatttcctgtatcatccttttcaataaactgtattcattttgcatagcaaaaaaaaaaaaaaaaa

SEQ ID NO: 100 - DNA, 1017 bp, Homo sapiens
gagtcagtgtcagcccgaaggctgaaggaaaaagagcaacagatccagggagcattcacctgccctgtctccaaacagccttgtgcctcacctacccccaacctcccagagggagcagctatttaaggggagcaggagtgcagaacaaacaagacggcctggggatacaactctggagtcctctgagagagccaccaaggaggagcaggggagcgacggccggggcagaagttgagaccacccagcagaggagctaggccagtccatctgcatttgtcacccaagaactcttaccatgaagaccctcctactgttggcagtgatcatgatctttggcctactgcaggcccatgggaatttggtgaatttccacagaatgatcaagttgacgacaggaaaggaagccgcactcagttatggcttctacggctgccactgtggcgtgggtggcagaggatcccccaaggatgcaacggatcgctgctgtgtcactcatgactgttgctacaaacgtctggagaaacgtggatgtggcaccaaatttctgagctacaagtttagcaactcggggagcagaatcacctgtgcaaaacaggactcctgcagaagtcaactgtgtgagtgtgataaggctgctgccacctgttttgctagaaacaagacgacctacaataaaaagtaccagtactattccaataaacactgcagagggagcacccctcgttgctgagtcccctcttccctggaaaccttccacccagtgctgaatttccctctctcataccctccctccctaccctaaccaagttccttggccatgcagaaagcatccctcacccatcctagaggccaggcaggagcccttctatacccacccagaatgagacatccagcagatttccagccttctactgctctcctccacctcaactccgtgcttaaccaaagaagctgtactccggggggtctcttctgaataaagcaattagcaaatcatgtaaaaaaaaaaaaaaaaaa

SEQ ID NO: 101 - DNA, 2619 bp, Homo sapiens
gagctcgcccaccgcccgccccagcagtggctgcaccatgcacgtgaacggcaaagtggcgctggtgaccggcgcggctcagggcataggcagagcctttgcagaggcgctgctgcttaagggcgccaaggtagcgctggtggattggaatcttgaagcaggtgtacagtgtaaagctgccctggatgagcagtttgaacctcagaagactctgttcatccagtgcgatgtggctgaccagcaacaactgagagacacttttagaaaagttgtagaccactttggaagactggacattttggtcaataatgctggagtgaataatgagaaaaactgggaaaaaactctgcaaattaatttggtttctgttatcagtggaacctatcttggtttggattacatgagtaagcaaaatggaggtgaaggcggcatcattatcaatatgtcatctttagcaggactcatgcccgttgcacagcagccggtttattgtgcttcaaagcatggcatagttggattcacacgctcagcagcgttggctgctaatcttatgaacagtggtgtgagactgaatgccatttgtccaggctttgttaacacagccatccttgaatcaattgaaaaagaagaaaacatgggacaatatatagaatataaggatcatatcaaggatatgattaaatactatggaattttggacccaccattgattgccaatggattgataacactcattgaagatgatgctttaaatggtgctattatgaagatcacaacttctaagggaattcattttcaagactatgatacaactccatttcaagcaaaaacccaatgaacagcttatgtgttagccatagctgaaaataagcacaaatagcttatattcagatcctatcttcatttgaatatagcttttaaatgaaatgttacagtttgaagttttccttcatgcacttggtgataaacgttttctaaatttttagttaagtatatggataaaaagttatgaactattaaaaatgtgatgtggaccaaaggctaggttgtaatcttgatagtctaaaaaatgatcaaaacaaatgattttcaaggaatattcaatattctgcctttcagaaagtgtatttatatctgtgcttcataaatattaatgttcttcagaacatcattttaaaggagatacttgaattgttatttaaatcaaaccagatgtaaaacactcacatacaagttcatactttaaaagaggaaagctacttaacaatgacaaatatttcacaataataatttttacttatataccatctttcaactgaacatttcagttcttccaagagcttcttagagtagtatattttgggggcagtcaaggaataaactacagtgtaaacatatcccagatgaaaactgctgtatggaaaaatgacagaaagtaactgattgacactgttgattcacagttcagcctcctatctgggaaagacatttctttcctctgctcactttaagaacttttaccgactccaaaaatctcaggaattaaacttttaacagttacagcaataaagaatagttagtactccaaaaatattatatttaagatgctcaacaagaaaaaaatgcaaatgtaatatttttttcaaattacttctttattgacttgtccaaatttcaaaagtgcctacccttcaataaaacttttttattctgatctccataaattacttagtcttctatgtatagctatcaaggaaataaaaccaattttgccacagccacaactgtaaatgtttttgtacccatgctgaaactcataacaacacagacataaaaatagctgtgaggttttgctttttttgttgtcagctatcttaagaatcattaaatacacctgctttgggtaaaactctttgcaagcagtaattaacactagtaacagtgaaagcacaagatttccaaatcagtcgttttctcaaaaaaatatcgtataagtgactcatcctgtctgctaactccagacctcccagcttgaagccaaatctttccatgtgagattgatatggatttcctagaagtactggaatgttgtcatatcttgccctattttaattctgctatagaaaacaattgccttcacttttaaggagtaatttgaatattaataactctggtctagattttcatataatgtattaaagacaaagtagtgaacatcaatgaacatctgatagagataaactgtaatcaggcataagcttgtttgtatgttctggcagtgactaatcagtaaatgatgtcggtttgcccagtatcacttatcttctgtatttttcctctgtcgtgtaaatagtataaccttttcatttatggacaattttttggactagtagccttcaatatacattctgctttgaattaattttttcaaatcaataaattatgtagacatttaaaatcaaatatcaagtagaattgaaaaatgtgagttacataagttaaaaacttactttaaatcttaccttctataggtagctctaaataaattcatatggttatatggcatctctggtgtatactgattgagaaaataattaaactgaagttaggggaggggga

SEQ ID NO: 102 - DNA, 785 bp, Homo sapiens
gtaaagggtcttctgagctgcagtggcaattagaccagaagatccccgctcctgtctctaaagaggggaaagggcaaggatggtggaggctttctgtgctacctggaagctgaccaacagtcagaactttgatgagtacatgaaggctctaggcgtgggctttgccactaggcaggtgggaaatgtgaccaaaccaacggtaattatcagtcaagaaggagacaaagtggtcatcaggactctcagcacattcaagaacacggagattagtttccagctgggagaagagtttgatgaaaccactgcagatgatagaaactgtaagtctgttgttagcctggatggagacaaacttgttcacatacagaaatgggatggcaaagaaacaaattttgtaagagaaattaaggatggcaaaatggttatgacccttacttttggtgatgtggttgctgttcgccactatgagaaggcataaaaatgttcctggtcggggcttggaagagctcttcagtttttctgtttcctcaagtctcagtgctatcctattacaacatggctgatcattaattagaaggttatccttggtgtggaggtggaaaatggtgatttaaaaacttgttactccaagcaacttgcccaattttaatctgaaaatttatcatgttttataatttgaattaaagttttgtcccccccccccttttttttataaacaagtgaatacattttataatttcttttggaatgtaaatcaaatttgaataaaaatcttacacgtgaaa

SEQ ID NO: 103 - DNA, 2866 bp, Homo sapiens
agggaggggtccgggaaggcggagccagcggcggcccaggctctgggcactcgcgcggctcccgttcgcggagcacacatcccggcgcgacgaggttccttcggagagcgagcgggagtcggtgctcggcctcctgcggggagcagcccgaggaatctgcagggagaggtcgggaggtgacaacgccagcatgccagtgctatcggaggactctggtttgcatgaaaccctggccctgctgacctcccagctcagacctgactccaaccacaaggaggagatgggcttcctgagggatgttttcagtgaaaaaagcctcagttacttaatgaagattcatgagaagcttcgctattatgaaaggcaaagtccaaccccagttctgcacagcgctgtggccctcgctgaggacgtgatggaggagttgcaggccgcctccgtgcacagtgatgagagggagctgctccagctgctgtccaccccgcacctgagggctgtgctcatggtacatgacacggttgcccagaagaattttgaccccgttctcccgcctctgcctgacaatatcgatgaggattttgatgaggaatcggtgaagatcgtccgcttggtgaagaacaaggaacccctgggtgccaccatccggcgggacgagcactcaggggctgttgtggtggccaggatcatgcgaggaggcgcagcagacaggagcggcctggtccacgttggagatgagctccgagaagtgaacgggatcgcagtcctgcacaagcggcccgacgagatcagccagattctggcccagtcccagggatccatcaccctaaaaatcatcccagccacccaggaggaagatcgcttaaaggagagcaaggtgttcatgcgcgccctcttccactacaaccctcgggaggaccgggccatcccttgccaggaggcgggcctgcccttccagcgcaggcaggtcctggaggtggtgagccaggacgaccccacgtggtggcaggccaagcgagtcggggacaccaaccttcgagccggcctcatcccctccaaggggttccaggagagacgactaagctaccggagagccgcgggcaccctgccgagcccccagagcctcaggaagcccccctatgatcagccttgtgacaaagagacctgtgactgtgagggctacctcaaagggcactatgtggctggtcttcggaggagcttccggctgggctgtagggagagactgggtggctcgcaggaaggaaagatgtcctccggagctgagtctccggagctgctgacttacgaagaggtggccaggtaccaacaccagcccggagagcggccccgcctggtggttctgatcgggtctctgggagcccgactgcacgagctgaagcaaaaggtggtggctgagaacccacagcactttggcgtcgctgttccacataccaccaggccccgaaagagccatgagaaggaaggagtggaatatcactttgtgtctaagcaagcatttgaggccgacttacatcacaacaagttcctggaacatggtgaatataaggaaaatctgtatggaaccagcctggaggccattcaggctgttatggccaaaaacaaagtttgtttggtggatgtggagccagaagcactgaaacaactgaggacctcagaatttaaaccctatattatatttgtaaagcctgcaattcaggaaaaaagaaaaacgccacctatgtccccagcttgtgaggacacagcagccccatttgatgagcagcagcaagagatggccgcttctgccgccttcatagaccggcattacgggcacctggtagacgccgtgctggtgaaggaggatctccagggtgcctacagccagctcaaagtggtcttagagaagctgagcaaggacactcactgggtacctgttagttgggtcaggtaactttatcccagaacatccaagctggacgggaccttgaagatcatctagtccagactccctcattttaccatcaaggaatctcaagcgcagagagggagagaattctccacaaattccatcatcgagaagagtataagtgggaagtcttgtttgttgttggtttttgtctgttgtttttcactgcacctctttggatcatgatttgaaaggggcatatcagaaaacaacacatttcatttattaaagtatcacaggcaagctgaccctgattctttgtaccaaagttaagtagccactgtcttttgtgggtggtagtggttaatttatacagtactgattcgcagaatgtttaagctttttaaacatagtgacgcttagtagtttttttggaagctaacttgttttatccaaggggattttacatgtaactgaagttcccctgtcttcaagcactaaaacgttgatcttaaccttttttttgaagtgcttgcctggtaatagaaaacgggttctctgcctattttaaaatagtgaatatacgtaaattttctctggaaggctgaggcacacttcaccatcaacatgaattactgtactatcctgtactgcagtggtgccttcagggactcgaggaatgtaaggttgcctttcccctttctaaataccctcagattcctaacatcgagcccatgctttgtttgatttgttctattccatccattgtcccttttgttactgacagttgccttggtcctagccagtccctgccatgagatcataggggttcccattgtgctagatcttgggaaaccagatgactctccctgtcaaaactatggctacgtcactgtaaaccatttctgtcaagaataaaagtatgtagacccagagtgtgggcctaaaaaaaaaaaaaaaaaa

SEQ ID NO: 104 - DNA, 1434 bp, Homo sapiens
acccactgggaatatgattatgcttaatctatgctcagttgaaaggggctggggctgctttctcccctcccttcttgactctctgttcacagaactcaggctgcctccagccagcctttgcccgctagactcactggccctgagcacttgaaggtgcagcaagtcactgagaatgagcactttcttctcggacacagcatggatctgcctggctgtccccacagtactatgtgggacagtattttgcaaatacaagaagagctcagggcagctgtggagctggatggtctgcctggcaggcctctgtgcagtctgcctgctcatcctgtcccctttttggggcttgatcctcttctcggtgtcatgcttcctcatgtatacttacttatctggccaagaattgttacctgtggatcagaaggcagtcctggtgacaggtggtgattgcgggcttggccatgctttgtgcaagtatctggatgagctgggcttcacggtatttgccggagttttgaatgaaaatggcccaggagctgaggaattgcgaagaacctgctctccgcgcctctcggtgctccaaatggacatcacgaagccagtgcagataaaagatgcttacagcaaggttgcagcaatgctgcaggacagaggactgtgggctgtgatcaacaatgctggggtgcttggctttccaactgatggggagcttcttcttatgactgactacaaacaatgcatggccgtgaacttctttggaactgtggaggtcacaaagacgtttttgcctcttcttagaaaatccaaagggaggctggtgaatgtcagcagcatgggaggaggggccccaatggaaaggctggcatcttatggctcatcaaaggcggctgtgaccatgttctcatcagttatgagactggagctttccaagtggggaattaaagttgcttccatccaacctggaggcttcctaacaaatatcgcaggcaccagtgacaagtgggaaaagctggagaaggacattctggaccacctccccgctgaggtacaggaagactacggccaggactacatcttagcacagcggaatttcctcctattgatcaactcgttagccagcaaggacttctctccggtgctgcgggacatccagcatgctatcttggcgaagagcccttttgcctattacacgccagggaaaggcgcttacttgtggatctgccttgctcactatttgcctattggcatatatgattactttgctaaaagacattttggccaagacaagcccatgcccagagctctaagaatgcctaactacaagaaaaaggccacctaggcaatggaagccctcaaagaagtcggaatgtcatagtcttgaaatgaaagggaaactgggaaactgggtttctcattaaagttgtttcccactctgta

SEQ ID NO: 105 - DNA, 573 bp, Homo sapiens
aaacactctgtgtggctcctcggctttgacagagtgcaagacgatgacttgcaaaatgtcgcagctggaacgcaacatagagaccatcatcaacaccttccaccaatactctgtgaagctggggcacccagacaccctgaaccagggggaattcaaagagctggtgcgaaaagatctgcaaaattttctcaagaaggagaataagaatgaaaaggtcatagaacacatcatggaggacctggacacaaatgcagacaagcagctgagcttcgaggagttcatcatgctgatggcgaggctaacctgggcctcccacgagaagatgcacgagggtgacgagggccctggccaccaccataagccaggcctcggggagggcaccccctaagaccacagtggccaagatcacagtggccacggccacggccacagtcatggtggccacggccacagccactaatcaggaggccaggccaccctgcctctacccaaccagggccccggggcctgttatgtcaaactgtcttggctgtggggctaggggctggggccaaataaagtctcttcctccaa

SEQ ID NO: 106 - DNA, 596 bp, Homo sapiens
agagtcactcctgccttcaccatgaagtccagcggcctcttccccttcctggtgctgcttgccctgggaactctggcaccttgggctgtggaaggctctggaaagtccttcaaagctggagtctgtcctcctaagaaatctgcccagtgccttagatacaagaaacctgagtgccagagtgactggcagtgtccagggaagaagagatgttgtcctgacacttgtggcatcaaatgcctggatcctgttgacaccccaaacccaacaaggaggaagcctgggaagtgcccagtgacttatggccaatgtttgatgcttaacccccccaatttctgtgagatggatggccagtgcaagcgtgacttgaagtgttgcatgggcatgtgtgggaaatcctgcgtttcccctgtgaaagcttgattcctgccatatggaggaggctctggagtcctgctctgtgtggtccaggtcctttccaccctgagacttggctccaccactgatatcctcctttggggaaaggcttggcacacagcaggctttcaagaagtgccagttgatcaatgaataaataaacgagcctatttctctttgca

SEQ ID NO: 107 - DNA, 5631 bp, Homo sapiens
agacatctgctcctcacatgaatgcactcacctcctagagaccaggctgccatcatgctctggaagcttgtggagaatgtcaagtacgaagatatctatgaggaccggcacgatggtgtcccgagccacagctcgcggctctcccagctgggctcggtgtcccaaggaccctactcgagcgccccgccgctgtcccacaccccgtcgtcggacttccagccgccctacttcccacccccctaccagccgctcccctaccaccagagccaggacccctactcccacgtcaacgacccctactccctgaacccactgcaccagccccagcaacatccctgggggcaacggcagcggcaagaagtgggttcggaagccggctctctcctgccccagcctcgggccgccttgccccagctctcgggccttgacccccggagggactaccactcggtccgccggccggacgtgctgctgcattcggcgcaccacggcctggacgcgggcatgggtgacagcctctcgctgcacggcctcggccatcccggaatggaagacgtccagtcagttgaagatgccaataacagcggcatgaatctattggaccagtctgtcattaaaaaagttccagttcctcccaaatcggtgacttctctaatgatgaataaagacggcttcctgggaggcatgtctgtcaacaccggcgaggtgttttgctccgtcccaggccgtttgtctctgctcagttcaacttcgaagtacaaagtaactgtgggagaagttcagagacggctgtcgccccctgaatgcctcaatgcatctctcctcggcggagtcctcagaagagccaaatcgaaaaatggggggagatctttgcgagaaaggctagaaaaaatcggtttgaatttacccgcgggcaggcgcaaagcagcaaatgtcacgttactcacctccctggtggaaggagaagctgttcacttagctagggattttgggtacatttgcgaaacggagtttcccgccaaagccgtctctgagtatttgaaccggcagcacacagacccgagtgacctgcactcccgaaagaatatgctgttggccaccaagcaactttgtaaagaatttacggatctactggcgcaggaccggacaccgatagggaacagccgacccagccccatcctggagccggggatccagagctgcctcacgcacttcagcctcatcacgcacggcttcggcgccccggccatttgcgccgcgctcacggccctgcagaactatctcaccgaggcgctcaaaggcatggacaagatgttcttgaacaacaccaccactaacaggcacacgtctggggaaggcccaggtagtaaaactggcgacaaggaggagaaacacaggaaatgaaaaatttttaaaaaaagaaggaaaaatgttttaaatacaaaaggaaaaacagacaaaaatttaattttagctttaaaatattggattggctttggaagaattatattaggtagaatacacatacaatcaaaattttaaaaaaaaaagctaaataacttaaaaaaaaactgaggcgtacaacggagcaacaatatcggttctcagtgtctatttcaagatacatttggagacaaccgtccggattttccacttcggttctttcgagtttagtaatactgataataaaagaaaaccatgatttccccttccctttggaaaataaacataagactaaacatgagaaaaacgctaacttattggaagaaaatcggagaaacgttggtgtcaatgctttgagagctggttgactgagacgcacgaactttttaattttaaatatatttttaggaaactctcgcagtccccgccctccatctcacctcacccgtctcccaaccacccttttccatgttaccctcccttcctcacattgttacgggaatcttctgggatgaaaatgagtgtggttggcccttttgcgttgtttcagtcctctcggtacctccccgcccagccctgcgatcttaactcaccgggcccggctccccggccgcttgcataattagggagggcgagggcggggcgggaggcctgtggagaccaggcggaggctgcaatttttggtgccggccggcagagcaggttctggcggctgaggaaaatccggaccaataagttgattcaaacatcatcagttcctttcagaaatgttactagctcccagccttgccagcatctgcatagagagaatctcacatttattatatttgtgtcatctactaattttatgaactatagtaaaaaaaaaaaaacacacacacacacaatatgaatacgttgattagtatgtaattccttcggaggggtatgtaccatttcattctcttctgttttccaaagctttgcccgcatggtttatgagcttcttcaaagaggacttgggcttcctacacaatctataaggtacagagaaaaaaaaatccgatccctttttaatcaaagcctgtgtgtcagaattctgcaggtgcacttctttaaagaagctcaaagggaataatttagaaagtggccaatatgatggaagcagctttgaatctacatgctaacattcctcaacactccaattccggtggaggtggcaggggagggggtctgcaaaatgaattttaagggaaaagagtaaggattcttagagccctatattctaatagtattgccctgcatttaaaattgatttgatttccctgggttctttggtgattgctgtttaagcaaggaaagaagcagctttacgagtggacgtggggaggagggcggcacaagcacccacatttctgtaacaattgctttcttacaagatgctttatgaatgaggcatttttccctcccagacgtgcacttgttttggcatataatggcaaaataatgcaaagtgaagggagatgtatttcagctttgatttttaccgtctggatacatcgggactattcccagtggataaagtttcatgcatttaatatttctcacttctggcagcccagctcctttcttgggctccatcttagcattatcatgaaataagatctggaatccattgtctgcacctccgcaaaagcagtgagaaattatcccgggataagggtgaatgagagaggtctctaaatatagtgttgatacactcacctatttaacaaagtagacgagatctttgcaataccccttaaagataacgacatagatgttgttctgcaggatttatagttaggacccactcaattctccaggactcccggttttgcccccctcccgctttgccttggtgggggtggggattgggggagtggggattgcgttggggttttaggaatctgctgagagctttgcccatttttattaaaagaggaaagggaagttaggaagctcgtctcaggtcaccaaaagggcccaagcaactgttagggccacactgcagcccatctccaacccctagcttcgtttagcacttctgatcttcatggcccagccctagaactgttgagaggaatgcaatggccaagagctagacgttacggagagtgtagtcactctcttttcccagctcagaggcctgcgccttcgtccgagagctcggccgatcgcattagatgtgttctgattgcacaaggccaggagagaccacactgaaaacgatcgtctcctttccttgcagggcaacgcgccccacgcgtgtgacgtgcgagagacgcgatggacgcgccttgctcttactgtgcaggtcctgagagcgtgtgggccacaggcgcccagtcgtgttgaggacatagaatcagccgctggaggggctgccgactgcgcgggcccttcccgctctcggtctcaccctaagggctaaggcgaccgagaaagccccattctccagtaggtaatggggcggcgcccggtgggctgcaggtggggagggctcccagcgccgccagcggccacccggggcgccggctcctggagggagagtggcctagaaatatccaaggaatccgaagcttcccctcctccacctctgccagtacggaaacaccccaccgtcacaatcctaaagcggggagatgggatgggaattgtcttacttggcaaggcagggtaccttcattgccagacgccctcatttgtgtgttcctccttgctccagcgagatagaaccttttgcgcccccaaccccgtttcgtggagtgagcccactaccccttctccctccctcacttctcctttcatgtaggacccccgcccccttgctttccttagccaggcccgctacatttatctgataattgagttattaaaagatttggtttccttgggcctataaatcaataaacagtaggattaacgcaatagtttgccttttaagtcaagggagacgtttaaggcaagcccctttgagctttgttttcaaaccaaacaggtgagttgcagctctccccccggcccctgcactcttcagacatttggtccctgcccactcctaaacgctcagtcccaaaacaaaatagcgaaagacaggaggagtcaggatgtggcagtgctgccttcacactttccacttcgcaagttcttttaaaggttccaaagatctccagaccattctctgccaaaccctgccgcctcctgcacgtattgcaggtctctggggagcaagaaatgtcctgtttgggtgaggattccgtcacctaaaaagatctttaacttctcccccaaagtgggaaggtaactttctcccccttttccccaccaccttcactcctacacccccaattaccttgcattttctttccttccttctggcctccacacccatagctttcctccatccccacttaaagaaccgaagaggcttttaaagacctggctgctttgttttccttggccaaggaagccactttctctcaagcaattatttcatatcctacgaaaactttggtcgaatggaaaactcgaaacctcgagcttatctacacactgttcctctgctacaatgctttcctagttaagagtgtttatagagaatttgtcatcacatctgatatcctgtacttgtaatacattatgtggaaaggaaataaccttaaaccgtctgatgttgcctcaagagcccaaacggcgtttccccacctttgacgatgtatgtgaaattactggcttaaaaaaaaaagtatcaatttttttttaacggaatgaacactatccttctttaaatgccaaaatcgactccacctttgagttggtctctaattctctaacattgtttttgccacacaatcaagaaatatcaatctattgactcttcacgagaagagctctggagggtattcatgttaagtttgtatatatttatttatgcttaatttaatgggaatgtgtaaatatggcgagcaagtagtttgggattatttatctgtgaatctatacctctgtgaatgggtggttaaaaaacctcttgaccctagatagaatcctatctgaatttttctgttctttataaacaagctgttatggtaatgggtagaaattggtttattgtccagtgttaatctgatttacataaataaaaagattgttgtgttttcatcttca

SEQ ID NO: 108 - DNA, 1174 bp, Homo sapiens
attgtgtcagaggaagcaaccatgcaggtgctaaccaagcgttaccccaagaactgcctgctgaccgtcatggaccggtatgcagccgaggtgcacaacatggagcaggtggtgatgatccccagccttctgcgggacgtgcagctgagtgggcctgggggccaggcccaggctgaggcccctgatctctacacctacttcaccatgctcaaggccatctgtgtggatgtggaccatgggctgctgccgcgggaggagtggcaggccaaggtggcaggcagcgaagagaatggaaccgcagagacagaggaagtcgaggacgagagtgcctcaggagagctggacctggaagcccagttccacctgcacttctccagcctccatcacatcctcatgcacctcaccgagaaagcccaggaggtgacaaggaaataccaggaaatgacgggacaagtttggtagaccttggacactagggaagatcccttcacatgatagaagacagactctttgatgaggtcggcggagcagttcactagccaatgatgagagcagaaaggcctagacctgcagccagaagtgaaggcggctcagttctccgggatgcttctctacctcctgagcaccaattcctggattccagtcactggctcacctttagaatgtctgttgctattcactgctcccctcgctcctcttaacagcttggggaggtgaccagtggttcaggagggactagacaattacctgtccagtgtggtatggtaggaagagtgtaggtgttggcacgtgaccaaaattcacatccctcctcatggcagtcattcagtatgtgtacttgtacaagttatttaacccattggagcctaaattccctcatctataaaatggggataatattatctacctcacaagcttatgaaaactaaacatgatgaatcaaaagcacttggcatgtgagggctattaaaatagcctgattttttttttctccccctctccccaatgtatttgctctggcccttgctttttaccctccagagctaagaggtagcagagtctcttgggatgagtgattcaccctcttacttggcgaccactgatgagatcaacaacaggtgaactataaacctattatttattgcagaactaataaaaaatccaaagccttgta

SEQ ID NO: 109 - DNA, 6194 bp, Homo sapiens
actaactcgcggctgcaggatcagcgtctggaagcagacgtttcggctacagacccagagaggaggagctggagatcaggaggcgtgagccgccaagagtttgcagaatctgtggtgtgaatgaactgggggcacctgggcgcacagatcgccccccttcccccgccccgggccacagttgagtagtggtacatttttttcaccctcttgtgaagaatttctttttattattatttgtcgtaaggtcttttgcacaatcacgcccacatttggggttggaaagccctaattaccgccgtcgctgatggacgttggaaacggagcgcctctccgtggaacagttgcctgcgcgccctcgccggaccggcggctccctagttgcgccccgaccaggccctgcccttgctgccggctcgcgcgcgtccgcgccccctccattcctgggcgcatcccagctctgccccaactcgggagtccaggcccgggcgccagtgcccgcttcagctccggttcactgcgcccgccggacgcgcgccggaggactccgcagccctgctcctgaccgtccccccaggcttaacccggtcgctccgctcggattcctcggctgcgctcgctcgggtggcgacttcctccccgcgccccctccccctcgccatgaagaagtccattggaatattaagcccaggagttgctttggggatggctggaagtgcaatgtcttccaagttcttcctagtggctttggccatatttttctccttcgcccaggttgtaattgaagccaattcttggtggtcgctaggtatgaataaccctgttcagatgtcagaagtatatattataggagcacagcctctctgcagccaactggcaggactttctcaaggacagaagaaactgtgccacttgtatcaggaccacatgcagtacatcggagaaggcgcgaagacaggcatcaaagaatgccagtatcaattccgacatcgaaggtggaactgcagcactgtggataacacctctgtttttggcagggtgatgcagataggcagccgcgagacggccttcacatacgcggtgagcgcagcaggggtggtgaacgccatgagccgggcgtgccgcgagggcgagctgtccacctgcggctgcagccgcgccgcgcgccccaaggacctgccgcgggactggctctggggcggctgcggcgacaacatcgactatggctaccgctttgccaaggagttcgtggacgcccgcgagcgggagcgcatccacgccaagggctcctacgagagtgctcgcatcctcatgaacctgcacaacaacgaggccggccgcaggacggtgtacaacctggctgatgtggcctgcaagtgccatggggtgtccggctcatgtagcctgaagacatgctggctgcagctggcagacttccgcaaggtgggtgatgccctgaaggagaagtacgacagcgcggcggccatgcggctcaacagccggggcaagttggtacaggtcaacagccgcttcaactcgcccaccacacaagacctggtctacatcgaccccagccctgactactgcgtgcgcaatgagagcaccggctcgctgggcacgcagggccgcctgtgcaacaagacgtcggagggcatggatggctgcgagctcatgtgctgcggccgtggctacgaccagttcaagaccgtgcagacggagcgctgccactgcaagttccactggtgctgctacgtcaagtgcaagaagtgcacggagatcgtggaccagtttgtgtgcaagtagtgggtgccacccagcactcagccccgctcccaggacccgcttatttatagaaagtacagtgattctggtttttggtttttagaaatattttttatttttccccaagaattgcaaccggaaccattttttttcctgttaccatctaagaactctgtggtttattattaatattataattattatttggcaataatgggggtgggaaccaagaaaaatatttattttgtggatctttgaaaaggtaatacaagacttcttttgatagtatagaatgaaggggaaataacacataccctaacttagctgtgtggacatggtacacatccagaaggtaaagaaatacattttctttttctcaaatatgccatcatatgggatgggtaggttccagttgaaagagggtggtagaaatctattcacaattcagcttctatgaccaaaatgagttgtaaattctctggtgcaagataaaaggtcttgggaaaacaaaacaaaacaaaacaaacctcccttccccagcagggctgctagcttgctttctgcattttcaaaatgataatttacaatggaaggacaagaatgtcatattctcaaggaaaaaaggtatatcacatgtctcattctcctcaaatattccatttgcagacagaccgtcatattctaatagctcatgaaatttgggcagcagggaggaaagtccccagaaattaaaaaatttaaaactcttatgtcaagatgttgatttgaagctgttataagaattaggattccagattgtaaaaagatccccaaatgattctggacactagatttttttgtttggggaggttggcttgaacataaatgaaaatatcctgttattttcttagggatacttggttagtaaattataatagtaaaaataatacatgaatcccattcacaggttctcagcccaagcaacaaggtaattgcgtgccattcagcactgcaccagagcagacaacctatttgaggaaaaacagtgaaatccaccttcctcttcacactgagccctctctgattcctccgtgttgtgatgtgatgctggccacgtttccaaacggcagctccactgggtcccctttggttgtaggacaggaaatgaaacattaggagctctgcttggaaaacagttcactacttagggatttttgtttcctaaaacttttattttgaggagcagtagttttctatgttttaatgacagaacttggctaatggaattcacagaggtgttgcagcgtatcactgttatgatcctgtgtttagattatccactcatgcttctcctattgtactgcaggtgtaccttaaaactgttcccagtgtacttgaacagttgcatttataaggggggaaatgtggtttaatggtgcctgatatctcaaagtcttttgtacataacatatatatatatatacatatatataaatataaatataaatatatctcattgcagccagtgatttagatttacagtttactctggggttatttctctgtctagagcattgttgtccttcactgcagtccagttgggattattccaaaagttttttgagtcttgagcttgggctgtggccctgctgtgatcataccttgagcacgacgaagcaaccttgtttctgaggaagcttgagttctgactcactgaaatgcgtgttgggttgaagatatcttttttcttttctgcctcacccctttgtctccaacctccatttctgttcactttgtggagagggcattacttgttcgttatagacatggacgttaagagatattcaaaactcagaagcatcagcaatgtttctcttttcttagttcattctgcagaatggaaacccatgcctattagaaatgacagtacttattaattgagtccctaaggaatattcagcccactacatagatagcttttttttttttttttttaataaggacacctctttccaaacagtgccatcaaatatgttcttatctcagacttacgttgttttaaaagtttggaaagatacacatctttcataccccccttaggcaggttggctttcatatcacctcagccaactgtggctcttaatttattgcataatgatattcacatcccctcagttgcagtgaattgtgagcaaaagatcttgaaagcaaaaagcactaattagtttaaaatgtcacttttttggtttttattatacaaaaaccatgaagtactttttttatttgctaaatcagattgttcctttttagtgactcatgtttatgaagagagttgagtttaacaatcctagcttttaaaagaaactatttaatgtaaaatattctacatgtcattcagatattatgtatatcttctagcctttattctgtacttttaatgtacatatttctgtcttgcgtgatttgtatatttcactggtttaaaaaacaaacatcgaaaggcttatgccaaatggaagatagaatataaaataaaacgttacttgtatattggtaagtggtttcaattgtccttcagataattcatgtggagatttttggagaaaccatgacggatagtttaggatgactacatgtcaaagtaataaaagagtggtgaattttaccaaaaccaagctatttggaagcttcaaaaggtttctatatgtaatggaacaaaaggggaattctcttttcctatatatgttccttacaaaaaaaaaaaaaaaagaaatcaagcagatggcttaaagctggttataggattgctcacattcttttagcattatgcatgtaacttaattgttttagagcgtgttgctgttgtaacatcccagagaagaatgaaaaggcacatgcttttatccgtgaccagatttttagtccaaaaaaatgtatttttttgtgtgtttaccactgcaactattgcacctctctatttgaatttactgtggaccatgtgtggtgtctctatgccctttgaaagcagtttttataaaaagaaagcccgggtctgcagagaatgaaaactggttggaaactaaaggttcattgtgttaagtgcaattaatacaagttattgtgcttttcaaaaatgtacacggaaatctggacagtgctccacagattgatacattagcctttgctttttctctttccggataaccttgtaacatattgaaaccttttaaggatgccaagaatgcattattccacaaaaaaacagcagaccaacatatagagtgtttaaaatagcatttctgggcaaattcaaactcttgtggttctaggactcacatctgtttcagtttttcctcagttgtatattgaccagtgttctttattgcaaaaacatatacccgatttagcagtgtcagcgtattttttcttctcatcctggagcgtattcaagatcttcccaatacaagaaaattaataaaaaatttatatataggcagcagcaaaagagccatgttcaaaatagtcattatgggctcaaatagaaagaagacttttaagttttaatccagtttatctgttgagttctgtgagctactgacctcctgagactggcactgtgtaagttttagttgcctaccctagctcttttctcgtacaattttgccaataccaagtttcaatttgtttttacaaaacattattcaagccactagaattatcaaatatgacgctatagcagagtaaatactctgaataagagaccggtactagctaactccaagagatcgttagcagcatcagtccacaaacacttagtggcccacaatatatagagagatagaaaaggtagttataacttgaagcatgtatttaatgcaaataggcacgaaggcacaggtctaaaatactacattgtcactgtaagctatacttttaaaatatttattttttttaaagtattttctagtcttttctctctctgtggaatggtgaaagagagatgccgtgttttgaaagtaagatgatgaaatgaatttttaattcaagaaacattcagaaacataggaattaaaacttagagaaatgatctaatttccctgttcacacaaactttacactttaatctgatgattggatattttattttagtgaaacatcatcttgttagctaactttaaaaaatggatgtagaatgattaaaggttggtatgatttttttttaatgtatcagtttgaacctagaatattgaattaaaatgctgtctcagtattttaaaagcaaaaaaggaatggaggaaaattgcatcttagaccatttttatatgcagtgtacaatttgctgggctagaaatgagataaagattatttatttttgttcatatcttgtacttttctattaaaatcattttatgaaatccaaaaaaaaaaaaaaaaaa

SEQ ID NO: 110 - DNA, 5017 bp, Homo sapiens
gagacacagaaatcagtgtcactcagtgacagaagcaacaataattgtgaaaaatacttcagcagttatggactcatctgtcattcaaaggaaaaaagtagctgtcattggtggtggcttggttggctcattacaagcatgctttcttgcaaagaggaatttccagattgatgtatatgaagctagggaagatactcgagtggctaccttcacacgtggaagaagcattaacttagccctttctcatagaggacgacaagccttgaaagctgttggcctggaagatcagattgtatcccaaggtattcccatgagagcaagaatgatccactctctttcaggaaaaaagtctgcaattccctatgggacaaagtctcagtatattctttctgtaagcagagaaaatctaaacaaggatctattgactgctgctgagaaataccccaatgtgaaaatgcactttaaccacaggctgttgaaatgtaatccagaggaaggaatgatcacagtgcttggatctgacaaagttcccaaagatgtcacttgtgacctcattgtaggatgtgatggagcctattcaactgtcagatctcacctgatgaagaaacctcgctttgattacagtcagcagtacattcctcatgggtacatggagttgactattccacctaagaacggagattatgccatggaacctaattatctgcatatttggcctagaaatacctttatgatgattgcacttcctaacatgaacaaatcattcacatgtactttgttcatgccctttgaagagtttgaaaaacttctaaccagtaatgatgtggtagatttcttccagaaatactttccggatgccatccctctaattggagagaaactcctagtgcaagatttcttcctgttgcctgcccagcccatgatatctgtaaagtgctcttcatttcactttaaatctcactgtgtactgctgggagatgcagctcatgctatagtgccgttttttgggcaaggaatgaatgcgggctttgaagactgcttggtatttgatgagttaatggataaattcagtaacgaccttagtttgtgtcttcctgtgttctcaagattgagaatcccagatgatcacgcgatttcagacctatccatgtacaattacatagagatgcgagcacatgtcaactcaagctggttcatttttcagaagaacatggagagatttcttcatgcgattatgccatcgacctttatccctctctatacaatggtcactttttccagaataagataccatgaggctgtgcagcgttggcattggcaaaaaaaggtgataaacaaaggactctttttcttgggatcactgatagccatcagcagtacctacctacttatacactacatgtcaccacgatctttcctccgcttgagaagaccatggaactggatagctcacttccggaatacaacatgtttccccgcaaaggccgtggactccctagaacaaatttccaatctcattagcaggtgatagaaaggttttgtggtagcaaatgcatgatttctctgtgaccaaaattaagcatgaaaaaaatgtttccattgccatatttgattcactagtggaagatagtgttctgcttataattaaactgaatgtagagtatctctgtatgttaattgcaattactggttggggggtgcattttaaaagatgaaacatgcagcttccctacattacacacactcaggttgagtcattctaactataaaagtgcaatgactaagatccttcacttctctgaaagtaaggccctagatgcctcagggaagacagtaatcatgccttttctttaaaagacacaataggactcgcaacagcattgactcaacacctaggactaaaaatcacaacttaactagcatgttaactgcacttttcattacgtgaatggaacttacctaaccacagggctcagacttactagataaaaccagaaatggaaataaggaattcaggggagttccagagacttacaaaatgaactcattttattttcccaccttcaaatataagtattatcatctatctgtttatcgtctatctatctatcatctatctatctatctatcatctatctatctatctatctatctatctatctatctatctatctctatttatttatgtatttagagatcaggtctcactctgttgaccaggctggagtgcagtggtgagatctgggttcactgcaacctctgcctcctgggctcaagcaatcctcccacttcagcctcccaaatagctggggctaccatggtatttttcagtagagaccgggtcttgccatgctgcccaggccagtctcaaactcctggcctcatgtgatctgcccacctcagcctcccaaagtacagggattagagttgtgagccaccgctgccagcccagagttaccctctaaagataagaaaaaggctattaatatcatactaagtgaaggacaggaaagggttttattcataaattaaatgtctacatgtgccagaatggaaaggaaacaaggggagacaacttttatagaaatacaaagccattactttattcaatttcagaccctcagaagcaatttactaatttattcttcgactacatactgcagcagaaccagcaatacacttgatttttaaaagcacatttagtgaaatgttttctttggttcatccttctttaacaggctgctgagtcactcagaaatccttcaaacatgattaattatgaagatgaaacactagagtcatataagaaataaaaattgggcaataaaataaaatgattcagtgtttcttttctatattgtcaatgaaaaccttgagttctaataatccatgttcagtttgtagggaaagaaaaaataatttttccttctacccactttaggttccttggctggggcccctataacaaaagacagattgacaagagaaaaacaaacataaatttattagcgggtatatgtaatatatatgtgggaaatacaggggaatgagcaaatctcaaagagctggcgtcttagaactccctggcttatatagcatcgacaaagaacagtaaatttttagagaaacaacaaaacaaagaaaaagagctttgagtctgtaggggcagcaatttgggggaagcaaatatatgggagtttgccttgtagattcctctggtgctggtctccaggctgacaaggattcaaagttgtctctgaaactcctctttgtcatactgcacatataaaacgtcttttgtttccaacaagaggattttctttttcattctagaattatctccttgataacttgatcagatataggacatgacactgaatagagtccaacagtacaaaaaaaattcagtatgttctagctacttcacacatgtgtacgcgacagttatttttacagtaaggtattttcgagaaaaatgcattacgtgttttggaaaatagagtaatttaaaaaatatatttgaaatgaaaatctccaacacattagaagatgatgatgttagatgcccatcgtgtgccacaagtggttttttcattatgtaaagcacccgttgaattaaaagaatttgtttttgttcaacctcttcctgaggcccaagagcatatgggcaattcggatttcctgctggaccacaaggttctgttgatattacatagaacgggtattccagacacttcttatgatgaaagtccaaaagtggcatccaatttaaggccccatctttcgttgccattcttcattcctacaaaggacgaacttggattacatcaactttggacccattggttttgtcgctgtcgtcaactgacagtgattcatcactggtgatgataaaaatgatggaagaagagttgaaagtcacttttttctttggcctgtccccatctttctgtgacatcacaatgggtctgatctgcatttcacttccagctgctggtaggtctttagcaggcctctggcacctcagcagtcggaggcacagaagctgcaaaagggatcttcgaaactgggcagagaaaaaataaagtggaatattaagtaaaagttgggcactaatctggattaacattcgaggaaatcagttgagctgaatttaagttgttttttgtttgttagcaggtgtggatgtggggttatgtggtcatgctcagatctacctaaatcaccccagagctttatgtcttttattcattctaattcttattaaccggaatatgtaggaccatttcaataccttgtaatcctccaagcttcaatctgcacacactttctatgagggcaggtacaactattaagagattttgaacattaagttagtccacaaatattcagtgggcatctactaggtgacagccactgtgctataattagagactttttactataagcatcaaaaacagataaggctcttcctggcagagtttacagcctggtgtacttgctaatgtctctttaattaggtgaagaattttttttttctatcgaaattactaatcagttggggaaaaaaatactatagcagacagcactaatgtcatcaacaaacattgttcttctccgtgtcctgggtacaacatcgaataatatttcttggcctcctttccgcttctcctctctgctgttcctctctacaagaacctgggaggccaacgcctaaagatcataatatcacacaatggaaggaacctagattcctaaatgactgcataggacagatcccatctcctccacccaatacattattagactgaactgtgacctgaaatgagcaataaactctgtattaattcactgaaatgttggggttgcttgttatagtagtcggtccatcatgaccagtaaaacataaatcaaaagttaatgtaattgttatcccattatttagagcgaaataaatgttgaatatatggactttctcagattaggaaataccaattaaaaatataataaatagcta

SEQ ID NO: 111 - DNA, 15151 bp, Homo sapiens
acattttcaaggaattcttgagaggttcttggagagattctgggagccaaacactccattgggatcctagctgttttagagaacaacttgtaatggagccttcatctcttgagctgccggctgacacagtgcagcgcattgcggctgaactcaaatgccacccaacggatgagagggtggctctccacctagatgaggaagataagctgaggcacttcagggagtgcttttatattcccaaaatacaggatctgcctccagttgatttatcattagtgaataaagatgaaaatgccatctatttcttgggaaattctcttggccttcaaccaaaaatggttaaaacatatcttgaagaagaactagataagtgggccaaaatagcagcctatggtcatgaagtggggaagcgtccttggattacaggagatgagagtattgtaggccttatgaaggacattgtaggagccaatgagaaagaaatagccctaatgaatgctttgactgtaaatttacatcttctaatgttatcattttttaagcctacgccaaaacgatataaaattcttctagaagccaaagccttcccttctgatcattatgctattgagtcacaactacaacttcacggacttaacattgaagaaagtatgcggatgataaagccaagagagggggaagaaaccttaagaatagaggatatccttgaagtaattgagaaggaaggagactcaattgcagtgatcctgttcagtggggtgcatttttacactggacagcactttaatattcctgccatcacaaaagctggacaagcgaagggttgttatgttggctttgatctagcacatgcagttggaaatgttgaactctacttacatgactggggagttgattttgcctgctggtgttcctacaagtatttaaatgcaggagcaggaggaattgctggtgccttcattcatgaaaagcatgcccatacgattaaacctgcattagtgggatggtttggccatgaactcagcaccagatttaagatggataacaaactgcagttaatccctggggtctgtggattccgaatttcaaatcctcccattttgttggtctgttccttgcatgctagtttagagatctttaagcaagcgacaatgaaggcattgcggaaaaaatctgttttgctaactggctatctggaatacctgatcaagcataactatggcaaagataaagcagcaaccaagaaaccagttgtgaacataattactccgtctcatgtagaggagcgggggtgccagctaacaataacattttctgttccaaacaaagatgttttccaagaactagaaaaaagaggagtggtttgtgacaagcggaatccaaatggcattcgagtggctccagttcctctctataattctttccatgatgtttataaatttaccaatctgctcacttctatacttgactctgcagaaacaaaaaattagcagtgttttctagaacaacttaagcaaattatactgaaagctgctgtggttatttcagtattattcgatttttaattattgaaagtatgtcaccattgaccacatgtaactaacaataaataatataccttacagaaaatctgatataatttttcagagtctgtggcactaaggagtccacagggctgcctaggtgctttgtgtttgggggaccaaaactgtgttggttcaagtattatctatacagtctctataagctgtcacatttcatggtcattgaaatgttttatgttggtttaatttctgatttaactgacaacttcataatgtatgtgcaattattgtgtcaaatttagaaatattactttagcttcaatttaccaaggagtttctttgaagcattgtagtctgatatatatatatatatatatatatatatatatatatatatatatatatgtgtgtgtgtgtgtgtgtatatatatatatatatatcatatatatatgatagtggctttcaaatttttttgggtacaatccacattgctcctgctgatctgtaatatcagaaaccagtatttatgtgaatatatgagaaatattattgattctaagatattttatcatattttaacatctttgaaagaggacccatctttcaattttcgatcaatagtttcttacagtcaccattggccatctttctcgttaccatctatgaaattagcatgcatctcaaataaacagttaccatcttctatttgataaaatagtctaaatagcaaaaataaaagtttttacaattatttgcctgtgctctaataggtactattctattttatctcataagaaatgttggaaactcattatattgatttccttacccactcatgggccctaattcacactttttaagaatgtttctttctttaatgttatcataatctcttactttttaaatgagaacttcccctaatataagagcttagatattatattactatgtttccatagtaaataaataaccccaagatctttttggggattagagatataagaaatatgtgctccatctcttgacatctttatctcaaatctatggacctttcttacccactgtgaaaaacctaaagttacacttagccctgttggacttacctagttttcaattgttgatgccacaatcattatttataagttgacaaaatagtgtagatttgtatacatagtcaacaaaaagagtgacataattattgcctccaattaaacaagtttgaatgaaataaacaaacttagataaacacttcggatggtagacgtaaacaataatatgtggaactccaacatcaacacctaccaataccagtaactactgatatttatcatgtacttaccatgtaccatgtattgtgctacattactcatgttatctcccttaattgagtggctacatactgctttagcaaatcttcctactgtaactaatcctcatagatggaagagttctcaaaaccttaaaactcatgcataagtggattcatatacatatataaaaatatatataaatatatatactttatatatatttatatttatatatttatatatttatattttaatatatttatataaatatatataaagtataatatatataaagtataaatatatatatatttatactttaagttcttggatacacgtgcagaacatgcaggtttgttacataggtatacatgtgccgtggtggattgctgcacccatcaacccgtcatctacatcaggtatttctcctaatgctcaccctcctcttatccccaactacccaaaaggacctggtgtgtgatgttcccctccctgtgttcatatgttctcattgttcaactctcacttatgggtaagaacatgcagtgtttgattttctgttcctctgttagtttgctgagaatgatggtttccagcttcatccatgtccctgcaaaggacatgaactcattcttttttatggctgcatagtattccatggtatatatgtgccacattttctttatccagtctatcattgatggccatttgagttggttccaagtcttcgctattgtgaatagtgctgcaatgaacatatgtgtgcatgtgtctttatagtagaatgatttataatccttagggtatacccagtaatgggattgctgggttaaatggtatttctggttctagatcctcgaggaattgccacactgtcttccacaatggttgaactaatttatactcccaccaacagtgtaaaagcattcctatttctccacatcctctcagcatctgttgtttcttgactttttaatgattagcattctaactggcgtgagatggtatttcattgtggttttgatttgcatttctctaatgaccagtgatgatgagttttttttcatatatttgttggccgcataaatgtcttcttttgagaagtgtctgttcgtatccttcacccactttttgatggggttgtgtttttcttgtaaatttatttaagtcccttgtagattctggatattttccctttgtcagatggatagattgcaaaaattttctcccgttctgtaggttgcccgatcactctgatgatagtttcttttgctgtgtagaagctctttagtttaatcaggttccatttgtcagttttggcttttgttgcaattgcttttggtgttttagtcttaaattctttgcccatgcctatgtcctgaatggtattgcctagatattcttctagggttttttttttggctttaggtcttgcagttaagtctttaatctatcttgagttaatttttgtataagatataagaaaggggtccagtttcagttttctgcatatggctagccagttttcccaacactatttattaaatagggaatcttttccccattgcttgtttttgtcaggtttatcaaagatcagatggttgtaaatgtgtggtgttatttctgaggcctctgttttgttccattggtctatatgtctgtttttgttcagtaccatgctgttttgtttactatagccttgtagtatagtttgaagtcaggtagtgtgatgcctccagctttgttctttttgcttaggattgtcttggcaatacaggttcttttttggttccatatgaaatttaaagtagttttttctaattctgtgaagaaagacaatggtagcttgatggaaatagcattgaatctataaattactctcagcaatatggccattttcaggatattgattcttcctatctatgagcatggaatgtttttccatttgtttgtgtcctctctggtatccttgagcagtggtttgtagttctcattgaagtagtccttcacatcccttgtaagttgtattcctaggtattttattctctttgcagcaattgtgaatgggagttcactcatgatttggttctctgtttgtcctatatacatatgttggtatataggaatgcttttattttaaagatggaagatgatgtctctctatgtaactcaggcaggtctcaaactcctgggctcaaatgatcctcctaccttaacctcctgagtagctgagactttagtcacacaccaccatgcctgaccaggaattgtttttcaacttcatagtggtaaacaaaacatatgtgttttcagttctcatggaacaagcagcttagtaggagaaacatatgttgaacttgtaagcagagaagtaaatctataatgacaaatcataatttctgaagggtattaattagatgtttgagtgaggggaaatattggaaggtgctcataagtttataaatgttctaaaatatttcatgctaatcacattaaaattatatcaaagtatataaacatatcatggaaaacataatcagcaccatgtactcaacacctaggttaaaaaatagcattaaaaattctctttccagctcacattctgctccctccccaaatccacagataaccatcgaattatattttgttttcttcattcccttactttctttaagttttacacccatgtatgtacccataaaaatctattagctaattttggttgtgcatgaatattgtatcaatgcaattatactgtatatattctgcttttgcacatatttttagattcatccatttgtggcatgtagctttccattcattttcactgctgctcagtattgtattacaaattttacatttgttttagggaagagtcataaaccatctttaagttctcctatgttacaagtaattttgtaaatgatgtgaggtggtgattctatttcattttttcccatatagataatttatattattaataattccttctatttcataagccaggtttctatatatctatataaatatagatatgtagatatatgaaagcaatatatatatggatgtctttctgggctatctgtactttcacactggctaatttgcttgttttttcatcaatacttcacttccttaattactacaacatagcagggcctggcatctgctagattaaatctctcagcttctttttattaagattgccctgaattgtcctggttatcctgggccccctactttttttatatttttgaatacatctaaataaatttagaataaatctattgtgttccataaaacccctgttgggatttcaattgaactgcaattaaattttagatcagttttggaagaattgactcaatagtgagccttcctacccaagaccatggcatttattttcatttatttatgatttctttaatgcttctcaaaattttttattttctctattatggaaacgcacatttatagtttgacaaattcctaagtacttctaattttattgtcattccacattatcttttttgttgttgttttaaaagacagggtctccctctgtcacccaggctggagtgtactgatgtgattatagctcactgcagtctcaacctcctgggctcaagtgatcctcccacgtcagcctgtggagtagctaggactacaggcatgtgccacaatgcctggctcatttttaagtgttaagttaaaaaaagttgtagaaacagtgttttgctacatttcccaggctggtctcaaactcctggccccaagcaatcttcctgcctcagcttcccatattcggattatacgcatgaggcattgcaccagccccatgtgttatcttttataaaatttaacatttaactgataattgatactgtatatacatgaattcaattggtatctatttttaatatgggaaattttatgcaaatgagcacatttttctcccttccttccttccttctttccttgttctctttctttctctctctttctctttctctctttctttctttctttctttctcacagggtgtcactctgttgcccaggcggagtgcagtggcacatgatcatagctcactgcaacctccaactcaaacacttgagtgatcctctgtcccccgtttcccaagcagctgggactacaggcacatgccacgatgccaagctaatttttaaaaataattttttttgtagattcagagtcttgctatgttgcccaggctaatctcaaactcctggcctcaagcagtcctccctcctcagcctcccattacaggcataagctgccactcctggacctcttttttttttttttttttttttttttgaggcagtctctctctgtcacccaggctggagtatagtggcacgatctcagctcactgcgggttcaagcaattttcatgcctcagcctcccaagtagctgggattacaggcatgggccactatgcccagctaatttttgtatttttcatagagacaggatttcaccatgttggctaggctggtatcaaactcctgacttcaggtgatccgcccactttgaccttccaaaatgctgggattacgtgtgagccaccaaacccagcccctcattttctttttgatttttatttattttcctctgtttttcttcttttggatttagggatgtgtgtgtggaggtgtattgagtccgttttttctttctatttgtgtggaaattatacacttattctttgttattttagcaattactctggctattttaacatgcaaatataatgaagtttagaattagccattttttataactctccttctgactagttgaagaaatgagaatgctttaacatcaaacagccaactctttacttatacactattgctattcattatagcatttttagtctagcttcctccctcctctttctctctctctctctctgtctctctctctctcactaatgtttgctatttctccctacaattcagaattttatttatggatgaagtacatatataatttattacaattcattttaatgaaaaacttttagtggtaaattgtattagtctttgggaaaaaacatttattgataccattttctcattacttaaaaatagtttcacttcatatagaattctatgtcgacagtaattttctttcaggaagtagaaaatattaagttacagtattttggcttccattactgctgttaagcattcagatcatcagagaaatgcaaatcagaaccacaatgagatgccatctcatgccagtcagaatggcaatcattaaaaagtcaggaaacaatagatgctggtgaggctgtggagaaataagaatgcttttacactgttagtgggaatgtaaattagttcaaccattgctcttaagggctctttgtctttaatgatccgcatttttattatgatgtgtctaggcagttattattgtgtttattctatttctttatttgctgtctatccaagatttgaggattaattttttaatttctagaaaattcagaagtattatttatttattcaattattacctctttctattatttcctttttaaaataaaagggtatatgttagaatttttcactctctcctttatgcctttaacttcatattttctatttctttgaatttctgggctgcattcttaagaattctaaaacatatattttagtttctaaaagtttcattagatttctgttcaaaattccttccatttgtgatctttcgaatgtgcttctgctttaggcattagtagtggacattctggttccccattgagcttccctgcatcagctgttttgcctggtggctgccaccaacgcttttagctacctccctcctcaaactttggggtcaggccacacactataaaggattggaaaaaaaaatgaaaatatgaaaaacttacactttgtatcagtcaggagaaggataatcttcacactacagtttatgcttcagaagccaccccttctctgtggattagaccatgactagaagtttcctgagaccatcccttgcccagctcttttggtgatccccttcacttcctctgttacaggtttccctgatgagcactccttcaataaaacatagtcatccaaatcccaatctcaagcacggtgtcacgggaacctgatctaagtcagcattttctttattcttaatcacaactagttgatagtccatatctaatatataatgaatgtacagttgtttctgttggagttcacatatgatgccttgtttcctttgtagttttgtgattgatagcttcgaactgctcatttaccttgaccttttgaattctttgaaaactgagttaagtctgattttccagagtttttatgtttgcttctgtcagttgcagagaatcaatgagaagaacactttaaattcttgttttcggtttttttccaatcacataagtaggatttacctgaatatatatataatatataaacatatatttatataaaataaaaacatataaaatatgaaatatataatacagtataaaatctattttatgtaaaatctattttatgtaaacatgataattaaatatatatttaaataatataaatataataaatatttgaagcaattgtattttttaaaaatttcttctaaagaaaaccaggatacatgtgcagaacctgcaggtttgttacataggtatacgtgtgccatggtggtttgctgcacctattgacccgtcctctaagttccctcccctcacctcccaccccccagcaggccctggtgtgtgttgttcccctctctgtgtccatgtattctcgcctcccacttatgagtgagaacacgcgatgtttggttttctgttcctgtgttaatttgctgaggatgatagcttccagcttcatccacgtccctgcaaaggacatgatctcattcctcaatactatggctacgtagtattccatggtgtatatataccacattttcttcatccagtcatgcaaatttatatgaatgtcaattcttttatagtgatcttctggggctattacaatatatagggctgtttttttaaaactaattatatttatttcatgttgctttaacttattaaaaaacagactgaagaaagactgggtgtgaagtcagtaaattaatttcaaattaaataaacttttctacagctattttatgctcaataactttctacttattcttgagttcaaaactatatgggttcacatttaaattatatagtgtattttctccataaactgaagttgttagaacattgatttttttaagtaaatggatttttgcaccacttcaagaaagaaaccttcaaacagcctggaaatatcacatcaataaagcacaacctgggaatcaaagtattagggtaccttgttactgagattatggatgtgatgcttctgtgggccattagcatgtgcactgtgtgtatgatatgctctatgttctcttcccactaataattttatttttaatttcagcaagatttagtctcaaataacacaataataatggaggtcattgtgaagtagtggatgtaaatagatctgatgtggttttggtttattgcagtaattgttttgactaattctctagtttttcaacttttgattgtttaagatggttcttgagtccttttgacatgaccctatctatttttgataacttcatagcctttagtataaaaacaggtaggcttatattacatatttccaacttcaaacttgttatttatttatctaagactatacagttcttttcagagaaaaaccttctttataaaccagaatcttaacaggaagagtgctcattttaattgagctgatcatgtttctaggattttttagttaaaagaaaatacatattttaaaaatataaattatatttttatttcatagtggtattttcaattttgtctgggataataagatgttttatttaacttgtttgattttgtagttttatctttgtgggaaggacctggtaagaggtaattgaatcatgggggcaggactttcccatgatgttctcatgataatgaataagtttcatgagatctgttggtttcataatgtggagtttccctgcaaaggctcttgtcctgtctgtgccatttgagacatgcctttcaacttctgccctgattgtgaggcctcccccgccatgtggaattgggtcttacttttgtaaattgcccagtctcaggtatgtctttatcagcagcctgaaaactgactaatatagtaagttggcaccagtagagaggggcactgctgaaaaggtacccgaatatgtggaagcaactttaaactgggtaacaggcagaggttggaatggtttggagggctcataagaagacaggaaagtgtgggaaatttggaactccctagagacttgttgaatggctttaaccaaaatgctgataataatatgaacaatgaagtccaggctgaggtggtctcagacaaagataaggaacttcttgggaactggagcaaaggtgactcttgttatgttttagacataaagcaaagagactggaggcattttgcccctgccctagagatttgtgggacattaaacttgagacagattatttagggtatctggaggaagaaatttttatgcagcaaagcattcaagaggtgacttggttgctattaaaggcattcagttttaaaagggaaatacagcataaaagttcagaaaattttcagcctgacaatgcagtagaaaaggaaaaccaattttctgaggagaaatttaagctggctgcagacatttacataagtaacaagaagctgaatgttaatcactaagacaatgaggaaaatgtctccagggcatgtcagagacctttgtggcagcccctcccatcacagaccaggagctttagaaggaaaaatggcttcgtgggctggtcacagggtccctctgctgtgtgcagtctagggacttggtgccctgtgtcccagcagctccatccatgactaaaaggggccaaggtacagcttgggctgtggcttcagagggtggaagccccaagtcttggcagcttccatatggtgttgagcctgggttcacagaagtcaagaactgaggtttgggaacttacaccaagatttcagaggatgtatggaaatgcctggatgcccaggcagaagtttgctgcaggggcaaggccctcatggagaacctctgctagggcagtgaagaagggaaaagtatggtgggagcccccatacagagtccctactgaggcaccacctagtggagctttgagaagagggccactgtcctccagaactcaggatggtaaatccaccacgcacctggaaaagctgcagacaattccagcctgttaaagcagccaggagggggctataccctgcaaagccacaggggcggacctgctcaaggctgtgggagaccacctcttgcatcagtgtgacctggatgtgagacatggagtcaaaggagatcattttggagctttaagatttgactgccccactggatttcagactttcatggggcctgtagccccttcgttttggccaatgcctcccatttggagtggctgtatttacccaatgcctgtatccccattgtatctaggaagtaactaacttgcttttgattttacaggcccataggtggaagggcgatgtttctttctggaggctccagggagaactctgttttcttaccttttctggattctagaggcttcccacaatccttggcttaaggtccatctttaagctttgtctctgatgagactttggactgcggacttttgagttaatgctgaaatgagttaagactttgggtgactgttgcgaagacatgattggttttgaaatgtgagaacatttaagaggggccaggggcagaatgatatggtttgactttgtccgcagtcaaatctcatcttgaatttctatgtgtttggagaggtacccggtgggaggtaattgaatcatgagggcaggtcttttctgtgctgttctcatgatggtgagtaagtctcatgagatctgatggttttataaaggggagtttccctgcccaagttcttctcttgtctgccatcatgtgcgatgtgcctttcacctctgccatgattatgaggcctccctggccatgtggaactgtgagtccattaaacctctttcttttgtaaattgcccaatcttgggaatgtctttatcagcagtgggaaaacggattaatatactaatttatagctagtaggtaaaaagccagggacttgccattagcgttggaagtggggttgtgggggcagtcttgtggaactgagcccttaacctgtggggttgaatgatatctccaggtatatcatgtcagaattgaattcaattagaggatacctagcttgcgttcaatgcagaattgcttgctggtgaggagaaatccctatacacattttggtgaccagaggtaaagcattttatgttgattcttgagtgagagagtagaaataacactggttttttccctatgtccttacaaccaccaattggatacattgtttcagtattttgaaatttttcatttaatttttataaattttctttttaaattttagattctacaatatctccaattcttcagtttattccctcttactatgtataagtatttccccaagtttcactttatctttctattactttttttacataatagagctataaaggcaattcacaattctctcttttctcatatataatatagagcatattataaatactctactttggaaaattattctttataggaaattacagataatatttgatgaagaaaatcgaatataatcatttttcaatacttaggataacagattcaggcaaagataaaacattaaaggaaaagttagtgaaaactattaatatatagtggaggcatcacgttgttatgaacttcattgatcaatactgataccactaaaaatggaacaacatgtaattatgtgctcaatgtgatgaatatgaagtagactgcaccactctgcagtacagtcaggaaataagaaaccaagtccaatcaaaatagccctaaagctaccttccagtttataaaaagtatgaagaatagaggggcaattaaatgataccataaagagtcaaatacagggcatgcaacatagctgctgattggatttattcaacatgtcagtggcatgaatacaataggaggcaggtagggagaaggcactaccctgaattatgagactgaagagatataataaacaaatgcaatgtgtggacttggttgggatcttcattcaaagaccaactataaaaagacattgttgtgagaattgaggaaatttgaatgagaaatgtatttttatctaatttgttagctgtgataatagtattgtgggagtaagaagctattcatatttctatatatatataccaagtacataggagtgaaataatacaaaatctggaatttgccttaaaattcctctgcaaaattataaaaaagaacgatgacaaactaaaaaggtgtagtattcttctatggctgctataacaaatgaccaaaaaacatagtgactgaaaataacccacatttattatcttacagttccataggttagaagttcaacatgggtctcatgagatcaaaagcaaggccttggcagggtgacgtttctttctggaggttccagggggaactctgttttcttactttttttagattctagaggcttcccacaatccttggcttaaggtccatctttaaagacagcaacgtttcatctctctacctattctttcatccttacatctttctctaactattccttttcttctgtcttccacttttaagagcctttttgagtctattgaggccaactggacaatcaaggattatctccctatgttaaggtcaattgattagtgacctaattccatctacaatcacaattcctctttgccatataatgtaaaatattcatacctctaaggattaggacatggacatctttgagggtcattagtcatcttaccacaggaaggaaggaaggaaggaaggaaggaaggaaggaaggaaggaaggaaggaaagggaggagaggagaggagaggtaggagggaagaagaaaaaaatagtatgaaaaaatcttgataaatttgaaaactgggtgaataatatgtggaattctctctatttttgttaatgttggaaaatttaataaaaacaatgaacagtga

SEQ ID NO: 112 - DNA, 8464 bp, Homo sapiens
gagccagagagacggcagcggccccggcctccctctccgccgcgcttcagcctcccgctccgccgcgctccagcctcgctctccgccgcccgcaccgccgcccgcgccctcaccagagcagccatggaggaggtggtgattgccggcatgtccgggaagctgccagagtcggagaacttgcaggagttctgggacaacctcatcggcggtgtggacatggtcacggacgatgaccgtcgctggaaggcggggctctacggcctgccccggcggtccggcaagctgaaggacctgtctaggtttgatgcctccttcttcggagtccaccccaagcaggcacacacgatggaccctcagctgcggctgctgctggaagtcacctatgaagccatcgtggacggaggcatcaacccagattcactccgaggaacacacactggcgtctgggtgggcgtgagcggctctgagacctcggaggccctgagccgagaccccgagacactcgtgggctacagcatggtgggctgccagcgagcgatgatggccaaccggctctccttcttcttcgacttcagagggcccagcatcgcactggacacagcctgctcctccagcctgatggccctgcagaacgcctaccaggccatccacagcgggcagtgccctgccgccatcgtggggggcatcaatgtcctgctgaagcccaacacctccgtgcagttcttgaggctggggatgctcagccccgagggcacctgcaaggccttcgacacagcggggaatgggtactgccgctcggagggtgtggtggccgtcctgctgaccaagaagtccctggcccggcgggtgtacgccaccatcctgaacgccggcaccaatacagatggcttcaaggagcaaggcgtgaccttcccctcaggggatatccaggagcagctcatccgctcgttgtaccagtcggccggagtggcccctgagtcatttgaatacatcgaagcccacggcacaggcaccaaggtgggcgacccccaggagctgaatggcatcacccgagccctgtgcgccacccgccaggagccgctgctcatcggctccaccaagtccaacatggggcacccggagccagcctcggggctggcagccctggccaaggtgctgctgtccctggagcacgggctctgggcccccaacctgcacttccatagccccaaccctgagatcccagcgctgttggatgggcggctgcaggtggtggaccagcccctgcccgtccgtggcggcaacgtgggcatcaactcctttggcttcgggggctccaacgtgcacatcatcctgaggcccaacacgcagccgccccccgcacccgccccacatgccaccctgccccgtctgctgcgggccagcggacgcacccctgaggccgtgcagaagctgctggagcagggcctccggcacagccaggacctggctttcctgagcatgctgaacgacatcgcggctgtccccgccaccgccatgcccttccgtggctacgctgtgctgggtggtgagcgcggtggcccagaggtgcagcaggtgcccgctggcgagcgcccgctctggttcatctgctctgggatgggcacacagtggcgcgggatggggctgagcctcatgcgcctggaccgcttccgagattccatcctacgctccgatgaggctgtgaagccattcggcctgaaggtgtcacagctgctgctgagcacagacgagagcacctttgatgacatcgtccattcgtttgtgagcctgactgccatccagataggcctcatagacctgctgagctgcatggggctgaggccagatggcatcgtcggccactccctgggggaggtggcctgtggctacgccgacggctgcctgtcccaggaggaggccgtcctcgctgcctactggaggggacagtgcatcaaagaagcccatctcccgccgggcgccatggcagccgtgggcttgtcctgggaggagtgtaaacagcgctgccccccgggcgtggtgcccgcctgccacaactccaaggacacagtcaccatctcgggacctcaggccccggtgtttgagttcgtggagcagctgaggaaggagggtgtgtttgccaaggaggtgcggaccggcggtatggccttccactcctacttcatggaggccatcgcacccccactgctgcaggagctcaagaaggtgatccgggagccgaagccacgttcagcccgctggctcagcacctctatccccgaggcccagtggcacagcagcctggcacgcacgtcctccgccgagtacaatgtcaacaacctggtgagccctgtgctgttccaggaggccctgtggcacgtgcctgagcacgcggtggtgctggagatcgcgccccacgccctgctgcaggctgtcctgaagcgtggcctgaagccgagctgcaccatcatccccctgatgaagaaggatcacagggacaacctggagttcttcctggccggcatcggcaggctgcacctctcaggcatcgacgccaaccccaatgccttgttcccacctgtggagttcccagctccccgaggaactcccctcatctccccactcatcaagtgggaccacagcctggcctgggacgtgccggccgccgaggacttccccaacggttcaggttccccctcagccgccatctacaacatcgacaccagctccgagtctcctgaccactacctggtggaccacaccctcgacggtcgcgtcctcttccccgccactggctacctgagcatagtgtggaagacgctggcccgcgccctgggcctgggcgtcgagcagctgcctgtggtgtttgaggatgtggtgctgcaccaggccaccatcctgcccaagactgggacagtgtccctggaggtacggctcctggaggcctcccgtgccttcgaggtgtcagagaacggcaacctggtagtgagtgggaaggtgtaccagtgggatgaccctgaccccaggctcttcgaccacccggaaagccccacccccaaccccacggagcccctcttcctggcccaggctgaagtttacaaggagctgcgtctgcgtggctacgactacggccctcatttccagggcatcctggaggccagcctggaaggtgactcggggaggctgctgtggaaggataactgggtgagcttcatggacaccatgctgcagatgtccatcctgggctcggccaagcacggcctgtacctgcccacccgtgtcaccgccatccacatcgaccctgccacccacaggcagaagctgtacacactgcaggacaaggcccaagtggctgacgtggtggtgagcaggtggctgagggtcacagtggccggaggcgtccacatctccgggctccacactgagtcggccccgcggcggcagcaggagcagcaggtgcccatcctggagaagttttgcttcactccccacacggaggaggggtgcctgtctgagcgcgctgccctgcaggaggagctgcaactgtgcaaggggctggtgcaggcactgcagaccaaggtgacccagcaggggctgaagatggtggtgcccggactggatggggcccagatcccccgggacccctcacagcaggaactgccccggctgttgtcggctgcctgcaggcttcagctcaacgggaacctgcagctggagctggcgcaggtgctggcccaggagaggcccaagctgccagaggaccctctgctcagcggcctcctggactccccggcactcaaggcctgcctggacactgccgtggagaacatgcccagcctgaagatgaaggtggtggaggtgctggctggccacggtcacctgtattcccgcatcccaggcctgctcagcccccatcccctgctgcagctgagctacacggccaccgaccgccacccccaggccctggaggctgcccaggccgagctgcagcagcacgacgttgcccagggccagtgggatcccgcagaccctgcccccagcgccctgggcagcgccgacctcctggtgtgcaactgtgctgtggctgccctcggggacccggcctcagctctcagcaacatggtggctgccctgagagaagggggctttctgctcctgcacacactgctccgggggcaccccctcggggacatcgtggccttcctcacctccactgagccgcagtatggccagggcatcctgagccaggacgcgtgggagagcctcttctccagggtgtcgctgcgcctggtgggcctgaagaagtccttctacggctccacgctcttcctgtgccgccggcccaccccgcaggacagccccatcttcctgccggtggacgataccagcttccgctgggtggagtctctgaagggcatcctggctgacgaagactcttcccggcctgtgtggctgaaggccatcaactgtgccacctcgggcgtggtgggcttggtgaactgtctccgccgagagcccggcgggaaccgcctccggtgtgtgctgctctccaacctcagcagcacctcccacgtcccggaggtggacccgggctccgcagaactgcagaaggtgttgcagggagacctggtgatgaacgtctaccgcgacggggcctggggggctttccgccacttcctgctggaggaggacaagcctgaggagccgacggcacatgcctttgtgagcaccctcacccggggggacctgtcctccatccgctgggtctgctcctcgctgcgccatgcccagcccacctgccctggcgcccagctctgcacggtctactacgcctccctcaacttccgcgacatcatgctggccactggcaagctgtcccctgatgccatcccagggaagtggacctcccaggacagcctgctaggtatggagttctcgggccgagacgccagcggcaagcgtgtgatgggactggtgcctgccaagggcctggccacctctgtcctgctgtcaccggacttcctctgggatgtgccttccaactggacgctggaggaggcggcctcggtgcctgtcgtctacagcacggcctactacgcgctggtggtgcgtgggcgggtgcgccccggggagacgctgctcatccactcgggctcgggcggcgtgggccaggccgccatcgccatcgccctcagtctgggctgccgcgtcttcaccaccgtggggtcggctgagaagcgggcgtacctccaggccaggttcccccagctcgacagcaccagcttcgccaactcccgggacacatccttcgagcagcatgtgctgtggcacacgggcgggaagggcgttgacctggtcttgaactccttggcggaagagaagctgcaggccagcgtgaggtgcttggctacgcacggtcgcttcctggaaattggcaaattcgacctttctcagaaccacccgctcggcatggctatcttcctgaagaacgtgacattccacggggtcctactggatgcgttcttcaacgagagcagtgctgactggcgggaggtgtgggcgcttgtgcaggccggcatccgggatggggtggtacggcccctcaagtgcacggtgttccatggggcccaggtggaggacgccttccgctacatggcccaagggaagcacattggcaaagtcgtcgtgcaggtgcttgcggaggagccggaggcagtgctgaagggggccaaacccaagctgatgtcggccatctccaagaccttctgcccggcccacaagagctacatcatcgctggtggtctgggtggcttcggcctggagttggcgcagtggctgatacagcgtggggtgcagaagctcgtgttgacttctcgctccgggatccggacaggctaccaggccaagcaggtccgccggtggaggcgccagggcgtacaggtgcaggtgtccaccagcaacatcagctcactggagggggcccggggcctcattgccgaggcggcgcagcttgggcccgtgggcggcgtcttcaacctggccgtggtcttgagagatggcttgctggagaaccagaccccagagttcttccaggacgtctgcaagcccaagtacagcggcaccctgaacctggacagggtgacccgagaggcgtgccctgagctggactactttgtggtcttctcctctgtgagctgcgggcgtggcaatgcgggacagagcaactacggctttgccaattccgccatggagcgtatctgtgagaaacgccggcacgaaggcctcccaggcctggccgtgcagtggggcgccatcggcgacgtgggcattttggtggagacgatgagcaccaacgacacgatcgtcagtggcacgctgccccagcgcatggcgtcctgcctggaggtgctggacctcttcctgaaccagccccacatggtcctgagcagctttgtgctggctgagaaggctgcggcctatagggacagggacagccagcgggacctggtggaggccgtggcacacatcctgggcatccgcgacttggctgctgtcaacctggacagctcactggcggacctgggcctggactcgctcatgagcgtggaggtgcgccagacgctggagcgtgagctcaacctggtgctgtccgtgcgcgaggtgcggcaactcacgctccggaaactgcaggagctgtcctcaaaggcggatgaggccagcgagctggcatgccccacgcccaaggaggatggtctggcccagcagcagactcagctgaacctgcgctccctgctggtgaacccggagggccccaccctgatgcggctcaactccgtgcagagctcggagcggcccctgttcctggtgcacccaatcgagggctccaccaccgtgttccacagcctggcctcccggctcagcatccccacctatggcctgcagtgcacccgagctgcgccccttgacagcatccacagcctggctgcctactacatcgactgcatcaggcaggtgcagcccgagggcccctaccgcgtggccggctactcctacggggcctgcgtggcctttgaaatgtgctcccagctgcaggcccagcagagcccagcccccacccacaacagcctcttcctgttcgacggctcgcccacctacgtactggcctacacccagagctaccgggcaaagctgaccccaggctgtgaggctgaggctgagacggaggccatatgcttcttcgtgcagcagttcacggacatggagcacaacagggtgctggaggcgctgctgccgctgaagggcctagaggagcgtgtggcagccgccgtggacctgatcatcaagagccaccagggcctggaccgccaggagctgagctttgcggcccggtccttctactacaagctgcgtgccgctgagcagtacacacccaaggccaagtaccatggcaacgtgatgctactgcgcgccaagacgggtggcgcctacggcgaggacctgggcgcggactacaacctctcccaggtatgcgacgggaaagtatccgtccacgtcatcgagggtgaccaccgcacgctgctggagggcagcggcctggagtccatcatcagcatcatccacagctccctggctgagccacgcgtgagcgtgcgggagggctaggcccgtgcccccgcctgccaccggaggtcactccaccatccccaccccaccccaccccacccccgccatgcaacgggattgaagggtcctgccggtgggaccctgtccggcccagtgccactgccccccgaggctgctagatgtaggtgttaggcatgtcccacccacccgccgcctcccacggcacctcggggacaccagagctgccgacttggagactcctggtctgtgaagagccggtggtgcccgtgcccgcaggaactgggctgggcctcgtgcgcccgtggggtctgcgcttggtctttctgtgcttggatttgcatatttattgcattgctggtagagacccccaggcctgtccaccctgccaagactcctcaggcagcgtgtgggtcccgcactctgcccccatttccccgatgtcccctgcgggcgcgggcagccacccaagcctgctggctgcggccccctctcggccaggcattggctcagcccgctgagtggggggtcgtgggccagtccccgaggagctgggcccctgcacaggcacacagggcccggccacacccagcggccccccgcacagccacccgtggggtgctgcccttatgcccggcgccgggcaccaactccatgtttggtgtttgtctgtgtttgtttttcaagaaatgattcaaattgctgcttggattttgaaatttactgtaactgtcagtgtacacgtctggaccccgtttcatttttacaccaatttggtaaaaatgctgctctcagcctcccacaattaaaccgcatgtgatctcca

SEQ ID NO: 113 - DNA, 1825 bp, Homo sapiens
gggacagtcctggcccactgcactgggaatctaggatgggggccttggccagagccctgccgtccatactgctggcattgctgcttacgtccaccccagaggctctgggtgccaaccccggcttggtcgccaggatcaccgacaagggactgcagtatgcggcccaggaggggctattagctctgcagagtgagctgctcaggatcacgctgcctgacttcaccggggacttgaggatcccccacgtcggccgtgggcgctatgagttccacagcctgaacatccacagctgtgagctgcttcactctgcgctgaggcctgtccctggccagggcctgagtctcagcatctccgactcctccatccgggtccagggcaggtggaaggtgcgcaagtcattcttcaaactacagggctcctttgatgtcagtgtcaagggcatcagcatttcggtcaacctcctgttgggcagcgagtcctccgggaggcccacagttactgcctccagctgcagcagtgacatcgctgacgtggaggtggacatgtcgggagacttggggtggctgttgaacctcttccacaaccagattgagtccaagttccagaaagtactggagagcaggatttgcgaaatgatccagaaatcagtgtcctccgatctacagccttatctccaaactctgccagttacaacagagattgacagtttcgccgacattgattatagcttagtggaagcccctcgggcaacagcccagatgctggaggtgatgtttaagggtgaaatctttcatcgtaaccaccgttctccagttaccctccttgctgcagtcatgagccttcctgaggaacacaacaaaatggtctactttgccatctcggattatgtcttcaacacggccagcctggtttatcatgaggaaggatatctgaacttctccatcacagatgacatgataccgcctgactctaatatccgactgaccaccaagtccttccgacccttcgtcccacggttagccaggctctaccccaacatgaacctggaactccagggatcagtgccctctgctccgctcctgaacttcagccctgggaatctgtctgtggacccctatatggagatagatgcctttgtgctcctgcccagctccagcaaggagcctgtcttccggctcagtgtggccactaatgtgtccgccaccttgaccttcaataccagcaagatcactgggttcctgaagccaggaaaggtaaaagtggaactgaaagaatccaaagttggactattcaatgcagagctgttggaagcgctcctcaactattacatccttaacaccttctaccccaagttcaatgataagttggccgaaggcttcccccttcctctgctgaagcgtgttcagctctacgaccttgggctgcagatccataaggacttcctgttcttgggtgccaatgtccaatacatgagagtttgaggacaagaaagatgaagcttggaggtcacagctggatctgcttgttgcatttccagctgtgcagcacgtctcagagattcttgaagaatgaagacatttctgctctcagctccgggggtgaggtgtgcctggcctctgcctccaccctcctcctcttcaccaggtgcatgcatgccctctctgagtctggactttgcttcccctccaggagggaccaccctccccgactggcctgggatatctttacaagcaggcactgtatttttttattcgccatctgatccccatgcctagcagagtgctggcacttagtaggtcctcaataaatatttattaaatgatga

SEQ ID NO: 114 - DNA, 3859 bp, Homo sapiens
ctaggcggcggcggccgggtccccaaggctgggcgctgcttgcggaaccgacggggcggagaggagcgtggcgggaggaggagtaggagaagggggctggtcaagggaagtgcgacgtgtctgcggagcctttttatacctccttcccgggagtccggcagccgctgctgctgctgctgctgctgctgccgccgccgccgccgccgtccctgcgtccttcggtctctgctcccgggacccgggctccgccgcagccagccagcatgtcggggatcaagaagcaaaagacggagaaccagcagaaatccaccaatgtagtctatcaggcccaccatgtgagcaggaataagagagggcaagtggttggaacaaggggtgggttccgaggatgtaccgtgtggctaacaggtctctctggtgctggaaaaacaacgataagttttgccctggaggagtaccttgtctcccatgccatcccttgttactccctggatggggacaatgtccgtcatggccttaacagaaatctcggattctctcctggggacagagaggaaaatatccgccggattgctgaggtggctaagctgtttgctgatgctggtctggtctgcattaccagctttatttctccattcgcaaaggatcgtgagaatgcccgcaaaatacatgaatcagcagggctgccattctttgaaatatttgtagatgcacctctaaatatttgtgaaagcagagacgtaaaaggcctctataaaagggccagagctggggagattaaaggatttacaggtattgattctgattatgagaaacctgaaactcctgagcgtgtgcttaaaaccaatttgtccacagtgagtgactgtgtccaccaggtagtggaacttctgcaagagcagaacattgtaccctatactataatcaaagatatccacgaactctttgtgccggaaaacaaacttgaccacgtccgagctgaggctgaaactctcccttcattatcaattactaagctggatctccagtgggtccaggttttgagcgaaggctgggccactcccctcaaaggtttcatgcgggagaaggagtacttacaggttatgcactttgacaccctgctagatgatggcgtgatcaacatgagcatccccattgtactgcccgtctctgcagaggataagacacggctggaagggtgcagcaagtttgtcctggcacatggtggacggagggtagctatcttacgagacgctgaattctatgaacacagaaaagaggaacgctgttcccgtgtttgggggacaacatgtacaaaacacccccatatcaaaatggtgatggaaagtggggactggctggttggtggagaccttcaggtgctggagaaaataagatggaatgatgggctggaccaataccgtctgacacctctggagctcaaacagaaatgtaaagaaatgaatgctgatgcggtgtttgcattccagttgcgcaatcctgtccacaatggccatgccctgttgatgcaggacactcgccgcaggctcctagagaggggctacaagcacccggtcctcctactacaccctctgggcggctggaccaaggatgacgatgtgcctctagactggcggatgaagcagcacgcggctgtgctcgaggaaggggtcctggatcccaagtcaaccattgttgccatctttccgtctcccatgttatatgctggccccacagaggtccagtggcactgcaggtcccggatgattgcgggtgccaatttctacattgtggggagggaccctgcaggaatgccccatcctgaaaccaagaaggatctgtatgaacccactcatgggggcaaggtcttgagcatggcccctggcctcacctctgtggaaatcattccattccgagtggctgcctacaacaaagccaaaaaagccatggacttctatgatccagcaaggcacaatgagtttgacttcatctcaggaactcgaatgaggaagctcgcccgggaaggagagaatcccccagatggcttcatggcccccaaagcatggaaggtcctgacagattattacaggtccctggagaagaactaagcctttggctccagagtttctttctgaagtgctctttgattaccttttctatttttatgattagatgctttgtattaaattgcttctcaatgatgcattttaatcttttataatgaagtaaaagttgtgtctataattaaaaaaaaatatatatatatacacacacacatatacatacaaagtcaaactgaagaccaaatcttagcaggtaaaagcaatattcttatacatttcataataaaattagctctatgtattttctactgcacctgagcaggcaggtcccagatttcttaaggctttgtttgaccatgtgtctagttacttgctgaaaagtgaatatattttccagcatgtcttgacaacctgtactcttccaatgtcatttatcagttgtaaaatatatcagattgtgtcctcttctgtacaattgacaaaaaaaaaaatttttttttctcactctaaaagaggtgtggctcacatcaagattcttcctgatattttacctcatgctgtacaaagccttaatgttgtaatcatatcttacgtgttgaagacctgactggagaaacaaaatgtgcaataacgtgaattttatcttagagatctgtgcagcctatttctgtcacaaaagttatattgtctaataagagaagtcttaatggcctctgtgaataatgtaactccagttacacggtgacttttaatagcatacagtgatttgatgaaaggacgtcaaacaatgtggcgatgtcgtggaaagttatctttcccgctctttgctgtggtcattgtgtcttgcagaaaggatggccctgatgcagcagcagcgccagctgtaataaaaaataattcacactatcagactagcaaggcactagaactggaaaagaccacagaaaacaaagaatccaaccctttcatcttacaggtgaacaaactgtgatgatgcacatgtatgtgttttgtaagctgtgagcaccgtaacaaaatgtaaatttgccattattaggaagtgctggtggcagtgaagaagcacccaggccacttgactcccagtctggtgccctgtctacaccagacaacacaggagctgggtcagattcccctcagctgcttaacaaagttcctcgaacagaaagtgcttacaaagctgccttctcggatactgaaaggtcgagttttctgaactgcactgattttattgcagttgaaaaaaaaaaaaagctattccaaagatttcaagctgttctgagacatcttctgatggctttacttcctgagaggcaatgtttttactttatgcataattcattgttgccaaggaataaagtgaagaaacagcaccttttaatatataggtctctctggaagagacctaaattagaaagagaaaactgtgacaattttcatattctcattcttaaaaaacactaatcttaactaacaaaagttcttttgagaataagttacacacaatggccacagcagtttgtctttaatagtatagtgcctatactcatgtaatcggttactcactactgcctttaaaaaaaaaaaccagcatatttattgaaaacatgagacaggattatagtgccttaaccgatatattttgtgacttaaaaaatacatttaaaactgctcttctgctctagtaccatgcttagtgcaaatgattatttctatgtacaactgatgcttgttcttattttaataaatttatcagagtgaaaaaaaaaaaaaaaaaa

SEQ ID NO: 115 - DNA, 3165 bp, Homo sapiens
atacagtttctctttgccagactagactaaagaaggagcactaatttattctgataaaacaggtctatgcagctaccaggacaatggaatctacgttgactttagcaacggaacaacctgttaagaagaacactcttaagaaatataaaatagcttgcattgttcttcttgctttgctggtgatcatgtcacttggattaggcctggggcttggactcaggaaactggaaaagcaaggcagctgcaggaagaagtgctttgatgcatcatttagaggactggagaactgccggtgtgatgtggcatgtaaagaccgaggtgattgctgctgggattttgaagacacctgtgtggaatcaactcgaatatggatgtgcaataaatttcgttgtggagagaccagattagaggccagcctttgctcttgttcagatgactgtttgcagaggaaagattgctgtgctgactataagagtgtttgccaaggagaaacctcatggctggaagaaaactgtgacacagcccagcagtctcagtgcccagaagggtttgacctgccaccagttatcttgttttctatggatggatttagagctgaatatttatacacatgggatactttaatgccaaatatcaataaactgaaaacatgtggaattcattcaaaatacatgagagctatgtatcctaccaaaaccttcccaaatcattacaccattgtcacgggcttgtatccagagtcacatggcatcattgacaataatatgtatgatgtaaatctcaacaagaatttttcactttcttcaaaggaacaaaataatccagcctggtggcatgggcaaccaatgtggctgacagcaatgtatcaaggtttaaaagccgctacctacttttggcccggatcagaagtggctataaatggctcctttccttccatatacatgccttacaacggaagtgtcccatttgaagagaggatttctacactgttaaaatggctggacctgcccaaagctgaaagacccaggttttataccatgtattttgaagaacctgattcctctggacatgcaggtggaccagtcagtgccagagtaattaaagccttacaggtagtagatcatgcttttgggatgttgatggaaggcctgaagcagcggaatttgcacaactgtgtcaatatcatccttctggctgaccatggaatggaccagacttattgtaacaagatggaatacatgactgattattttcccagaataaacttcttctacatgtacgaagggcctgccccccgcatccgagctcataatatacctcatgacttttttagttttaattctgaggaaattgttagaaacctcagttgccgaaaacctgatcagcatttcaagccctatttgactcctgatttgccaaagcgactgcactatgccaagaacgtcagaatcgacaaagttcatctctttgtggatcaacagtggctggctgttaggagtaaatcaaatacaaattgtggaggaggcaaccatggttataacaatgagtttaggagcatggaggctatctttctggcacatggacccagttttaaagagaagactgaagttgaaccatttgaaaatattgaagtctataacctaatgtgtgatcttctacgcattcaaccagcaccaaacaatggaacccatggtagtttaaaccatcttctgaaggtgcctttttatgagccatcccatgcagaggaggtgtcaaagttttctgtttgtggctttgctaatccattgcccacagagtctcttgactgtttctgccctcacctacaaaatagtactcagctggaacaagtgaatcagatgctaaatctcacccaagaagaaataacagcaacagtgaaagtaaatttgccatttgggaggcctagggtactgcagaagaacgtggaccactgtctcctttaccacagggaatatgtcagtggatttggaaaagctatgaggatgcccatgtggagttcatacacagtcccccagttgggagacacatcgcctctgcctcccactgtcccagactgtctgcgggctgatgtcagggttcctccttctgagagccaaaaatgttccttctatttagcagacaagaatatcacccacggcttcctctatcctcctgccagcaatagaacatcagatagccaatatgatgctttaattactagcaatttggtacctatgtatgaagaattcagaaaaatgtgggactacttccacagtgttcttcttataaaacatgccacagaaagaaatggagtaaatgtggttagtggaccaatatttgattataattatgatggccattttgatgctccagatgaaattaccaaacatttagccaacactgatgttcccatcccaacacactactttgtggtgctgaccagttgtaaaaacaagagccacacaccggaaaactgccctgggtggctggatgtcctaccctttatcatccctcaccgacctaccaacgtggagagctgtcctgaaggtaaaccagaagctctttgggttgaagaaagatttacagctcacattgcccgggtccgtgatgtagaacttctcactgggcttgacttctatcaggataaagtgcagcctgtctctgaaattttgcaactaaagacatatttaccaacatttgaaaccactatttaacttaataatgtctacttaatatataatttactgtataaagtaattttggcaaaatataagtgatttttttctggagaattgtaaaataaagttttctatttttccttaagtcccctaaaagccataatttttattattcctttttctcttttttcaattctatgaatatgtattattttaaagttatatttttcacacagagatgatgctatattacaccttcccttttttgttggtttcttaaactctaatctcatgacagattataccttccttattacttgttttatcttactcagaatctttgaatatatttttctgcccagaattatctaaacaaaagggagaacaaaagaagtatgtctcacttgggaactgaatcaactctaaatcagttttgtcacaaaactttttgtatttgactggcaatgctgattaaaattaaaaatgcaca

SEQ ID NO: 116 - DNA, 1101 bp, Homo sapiens
atgtgcggtgaggctcgcggccggagtgcggcgctgggcggaagctaccatggcggccgagcgaaagacaaggttgtccaagaatctactgcgcatgaagtttatgcaaaggggactggactcagaaaccaagaaacaactagaagaagaagaaaagaaaatcattagtgaagagcactggtacttggatttgccagagcttaaagagaaagagagtttcataatagaagagcagagtttcttactatgtgaagatcttctctatggaagaatgtcattcagaggatttaatcctgaggttgagaaattgatgcttcagatgaatgctaagcacaaagcagaagaagttgaagatgaaacagtagagcttgatgtgtcagatgaagagatggctagaagatatgagaccttggtggggacaattgggaaaaagtttgccagaaagagagaccatgccaattatgaagaagatgaaaatggagacataacaccaattaaagcaaagaagatgttcttaaagccccaggattaagatggatgccttaagcgatggcccaggggtgcttggtggaagtcagcagggcatctggagctcatcccaatggtgtctctatagttattaatactgtaacgtttacttgtaaagagattatcattttagaaacatgctgtttttgaaacagatgtgtgatggatgttgtacatcctttgcttcttggtattcattcagagtggatttttagcccctgatctacaaatgtacattgttacagggctgcttcctaaagattttttttacctcaggtttctcttaatatagttctccagtcactgaccttgaattgacttacataaactactgccaatgtttaaattgcccttatgtttatatttattatgtcaagccaattcgtacatacaatttggaatcaaatgtcataagaatttattatataaatttatcaagaataaaaatgcctctccagccttaagtatttacatgctcccaggtcattgtcagtttatggtattatgttgttttatttaaagcattgaattgatagaaaaatttgctctgtaataaaaatctactttcacata

SEQ ID NO: 117 - DNA, 3935 bp, Homo sapiens
atctgcatccatattgaaaacctgacacaatgtatgcagcaggctcagtgtgagtgaactggaggcttctctacaacatgacccaaaggagcattgcaggtcctatttgcaacctgaagtttgtgactctcctggttgccttaagttcagaactcccattcctgggagctggagtacagcttcaagacaatgggtataatggattgctcattgcaattaatcctcaggtacctgagaatcagaacctcatctcaaacattaaggaaatgataactgaagcttcattttacctatttaatgctaccaagagaagagtatttttcagaaatataaagattttaatacctgccacatggaaagctaataataacagcaaaataaaacaagaatcatatgaaaaggcaaatgtcatagtgactgactggtatggggcacatggagatgatccatacaccctacaatacagagggtgtggaaaagagggaaaatacattcatttcacacctaatttcctactgaatgataacttaacagctggctacggatcacgaggccgagtgtttgtccatgaatgggcccacctccgttggggtgtgttcgatgagtataacaatgacaaacctttctacataaatgggcaaaatcaaattaaagtgacaaggtgttcatctgacatcacaggcatttttgtgtgtgaaaaaggtccttgcccccaagaaaactgtattattagtaagctttttaaagaaggatgcacctttatctacaatagcacccaaaatgcaactgcatcaataatgttcatgcaaagtttatcttctgtggttgaattttgtaatgcaagtacccacaaccaagaagcaccaaacctacagaaccagatgtgcagcctcagaagtgcatgggatgtaatcacagactctgctgactttcaccacagctttcccatgaatgggactgagcttccacctcctcccacattctcgcttgtacaggctggtgacaaagtggtctgtttagtgctggatgtgtccagcaagatggcagaggctgacagactccttcaactacaacaagccgcagaattttatttgatgcagattgttgaaattcataccttcgtgggcattgccagtttcgacagcaaaggagagatcagagcccagctacaccaaattaacagcaatgatgatcgaaagttgctggtttcatatctgcccaccactgtatcagctaaaacagacatcagcatttgttcagggcttaagaaaggatttgaggtggttgaaaaactgaatggaaaagcttatggctctgtgatgatattagtgaccagcggagatgataagcttcttggcaattgcttacccactgtgctcagcagtggttcaacaattcactccattgccctgggttcatctgcagccccaaatctggaggaattatcacgtcttacaggaggtttaaagttctttgttccagatatatcaaactccaatagcatgattgatgctttcagtagaatttcctctggaactggagacattttccagcaacatattcagcttgaaagtacaggtgaaaatgtcaaacctcaccatcaattgaaaaacacagtgactgtggataatactgtgggcaacgacactatgtttctagttacgtggcaggccagtggtcctcctgagattatattatttgatcctgatggacgaaaatactacacaaataattttatcaccaatctaacttttcggacagctagtctttggattccaggaacagctaagcctgggcactggacttacaccctgaacaatacccatcattctctgcaagccctgaaagtgacagtgacctctcgcgcctccaactcagctgtgcccccagccactgtggaagcctttgtggaaagagacagcctccattttcctcatcctgtgatgatttatgccaatgtgaaacagggattttatcccattcttaatgccactgtcactgccacagttgagccagagactggagatcctgttacgctgagactccttgatgatggagcaggtgctgatgttataaaaaatgatggaatttactcgaggtattttttctcctttgctgcaaatggtagatatagcttgaaagtgcatgtcaatcactctcccagcataagcaccccagcccactctattccagggagtcatgctatgtatgtaccaggttacacagcaaacggtaatattcagatgaatgctccaaggaaatcagtaggcagaaatgaggaggagcgaaagtggggctttagccgagtcagctcaggaggctccttttcagtgctgggagttccagctggcccccaccctgatgtgtttccaccatgcaaaattattgacctggaagctgtaaaagtagaagaggaattgaccctatcttggacagcacctggagaagactttgatcagggccaggctacaagctatgaaataagaatgagtaaaagtctacagaatatccaagatgactttaacaatgctattttagtaaatacatcaaagcgaaatcctcagcaagctggcatcagggagatatttacgttctcaccccaaatttccacgaatggacctgaacatcagccaaatggagaaacacatgaaagccacagaatttatgttgcaatacgagcaatggataggaactccttacagtctgctgtatctaacattgcccaggcgcctctgtttattccccccaattctgatcctgtacctgccagagattatcttatattgaaaggagttttaacagcaatgggtttgataggaatcatttgccttattatagttgtgacacatcatactttaagcaggaaaaagagagcagacaagaaagagaatggaacaaaattattataaataaatatccaaagtgtcttccttcttagatataagacccatggccttcgactacaaaaacatactaacaaagtcaaattaacatcaaaactgtattaaaatgcattgagtttttgtacaatacagataagatttttacatggtagatcaacaaattctttttgggggtagattagaaaacccttacactttggctatgaacaaataataaaaattattctttaaagtaatgtctttaaaggcaaagggaagggtaaagtcggaccagtgtcaaggaaagtttgttttattgaggtggaaaaatagccccaagcagagaaaaggagggtaggtctgcattataactgtctgtgtgaagcaatcatttagttactttgattaatttttcttttctccttatctgtgcagaacaggttgcttgtttacaactgaagatcatgctatattttatatatgaagcccctaatgcaaagctctttacctcttgctattttgttatatatattacagatgaaatctcactgctaatgctcagagatcttttttcactgtaagaggtaacctttaacaatatgggtattacctttgtctcttcataccggttttatgacaaaggtctattgaatttatttgtttgtaagtttctactcccatcaaagcagctttctaagttattgccttggttattatggatgatagttatagcccttataatgccttaactaaggaagaaaagatgttattctgagtttgttttaatacatatatgaacatatagttttattcaattaaaccaaagaagaggtcagcagggagatactaacctttggaaatgattagctggctctgttttttggttaaataagagtctttaatcctttctccatcaagagttacttaccaagggcaggggaagggggatatagaggtcacaaggaaataaaaatcatctttcatctttaattttactccttcctcttatttttttaaaagattatcgaacaataaaatcatttgcctttttaa

SEQ ID NO: 118 - DNA, 5690 bp, Homo sapiens
acgagtcggcggcgctaccgaggggctgtgggcgcgcagctggaacctccggctgtcagtgcgcttacagttcctaaccccgaccctgcgcgcagcccgcactatggcagccccgccgcagctaagggctctgctcgtagtcgtcaacgcactgctgcgcaagcgccgctaccacgctgcgttggccgtgcttaagggcttccggaacggggctgtctatggagccaaaatccgggcccctcacgcgctggtcatgacctttctcttccggaatggcagcctccaggagaagctgtgggccatactgcaggccacatatatccactcctggaacctggcacggtttgtgttcacctacaagggtctccgtgccctgcagtcctacatacaaggcaagacctacccagcacacgcattcctggcggccttcctcgggggtatcctggtgtttggagaaaacaataacatcaacagccagatcaacatgtacctgttgtcacgcgtcctgtttgccctgagccgcctggctgtagagaagggctacatccctgaacccaggtgggacccgttcccgctgctcactgcggtggtgtgggggctggtgctgtggctctttgagtatcaccgatccaccctgcagccctcgctgcagtcctccatgacctacctctatgaggacagcaatgtatggcacgacatctcagacttcctcgtctataacaagagccgtccctccaattaatgcagccctgaggtgtctggctgtggctcaagatttggccccatgcagaccctcccaaaggatactgccttctcaagatcataggcctcagactccaactggtgttatcccagggttccgtttgctgaagtaaaaacactgattttaaaatcccagtgggtacctttgtatggtggcacaagtggccgaatcaggctgaggaatctacggcttggttccagctgtgcagctgacttctgtgagactggggccagccacactactctctaggcctcaggggtcaaggagctcagaggagggccctgaggtctctttccggtgggtatgttcattcttcaactgttcttatgtcacagagggctccttgctggtgggcagtgggttgtaaatactttttaaaaaacactaagttccttatctcagatgctgttctactggagaagttctagattcccactgtccaatagaaacacgtgagccatatatgtaattaaaatgtttctagtagctgcattacaaaaaagaagcctgggcactgtggctcactcctgtaatctcagaactttgggaggctgaggcaggtggatcacttgagctcaggagcttgagaccagcctgggcaacatggtgaaacccagtttctacaaaaaatacaaaaaattagccgggttccatcacctgtggttccagctgaggtgggaggatcacttgagcctatgaggtcgaggctacagtgagcaaagatcacgccactgcactccagcctgggcgacagtgagaccctgtctcaccaaagaaaaaaaaaaggtgagattaatcttcactatatattttaacacaaatttctaaaagttatttcaacatataattaacatcattagatattttgtactcttttttgtattaagtattcaaaattgggtgtatattttgccacccacattttcaggacccagtagccacatgtggctagtggctgctgtgacgggcaacacagatatggaacacttgtatcctcacagattattctagtggacagtgcagatctagagctagaggacatgggtttgagtccccactcccccactgtgtaaccttggggaaggttctggacctctcagagcctcaatttatcataaaatgaggataatcataatgccgtggtcctcactggacttgtgcaactaccactgatgtgctactaattactttcatttagtgcattcatacttccacttgggtgttttccacatattattattattttttttttttaagtagcgacagggtctcgctctgtcactagggctagtctcgacctcctagcctcaagcaatcttcctgcctcagtctcccaaagtgccatgattacaggcatgagccactgcccctagcctgcacatattatttttaaaccatacagtggccttgcaaatgtgtgttttcgtccccattttacagatgtagaaactgagggtcaggccaggtgcagtggctcacgcctgtaatcccagcactttgggaggctgaggcaggcagataacctgagatcaggagttcttgaccagcctggccaacatggtaaaaccccatctctactaaaaatacaaaaattagccaggcatggtggcacgtccctgtaatcccagctactggggaggctgaggcaggagaatcgcttgaacctgggaggcagaggctgcagtgagctgagatcgcacgactgcactccagcctgggccacagagcgagactgtgtctaaaaaaaaaataaaaaaagaaaagaaaagaaactgagaatcagagaggagagtaacttgcccaaggtaatacagctagtataacagccgaatcaagatttgaactcagattcgtctgatttcaaagcccatgttttttccagtgccttgtttcaaatttagaaacctaagccatgctatgcaaatgttagctcattataggatatgggccagaaaggggtacacattcaaatgcccataggggcctacaatgacatagtgctatgcgatgaggagtgatggggacatagggaactggagacttgtgtaccagtctgattttttcttttttttttttttttgagacagagtcttgctctctcgcccaggctggagtgcagtggcgcgatcttggctcactgcaagctctgcctcccaggtttacttacaccattctcctgcctcagcctccggagtagctgggcctacaggtgcccgccaccacacccggctaattttttgtatttttagtagagatggggtttcaccgtgttagccaggatggtctcaatctcctgacctcatgatccacccaccttggcctcccaaaatgctgggattacaggtgtgagccaccatgcctggccaagtctgcttttttcgaaaccacgatcctagaccaggcacggtggcttgcacctgtaatcccagcactttgggaggccgaggcgggtggatcacctgaggtcaggagttcgagaccagcctggccaacatggcgaaatcctgtctctactaaaaatacaaaaattagctggacatggtggcaggcacctgtaattccagctacttgggaggctgaggtgggagaatctcttgaacctggggggctgctgtgagccgagatagttccattacacttcagcctgggtgacagagtaagactctgtctcaaaaaaaaaaaaaaaaaaaaaaacacaatcctggacaaatcaaacaagtctccaggaaaatctggtccatgggctaccaatttgagaccattggtctggtagatacactttcattaatatacttactccatcactctttctatattttagaagttactagtagaaatgtatgcaggagtcactggagaccttattaaaatgcagcttctgattcagtgagctggggtggggcctgagagtctgcatttctcccaggctccctggtgctgccagtggtgctgctctgagtaacaagggggtggggaatgatatggagccgtccattattatcccatctgacaaatgagtcacagagcccttaggtaattgaggtgggatcagtctgattctgtaagctgtgttttcagccacaacatttactgcaaacttggagtaggtaattatgaagttcctttaacttgctgtggaggttgaatgagctctagagtaaggggtccgcaaccccggtaccggtccatggcctgttcggaaccaggccacgcagcaggagttgaaaggtgggtgagctagcgaagcttcatctgtatgtacagccactccccactgctcacattaccacctgagctctgccttctgtcagatcagtggtggcattagatgctcgtaggaatgcaaaccctattgtgaactgcgcatgcaagggatctaggttgcatgctccttatgagaatctaatgcctgatgatctgtcactgtctcccgtcacgccttgatgggactgtctagttgctggaaaacaaactcagggctcccactgattctacattatggtgtgttgtacaattatttcattatatattacaaggtaataataatagaaataaaatccacagtaaatgcaatgtgcttgaatcatcctgaaaccacgtcccctccccagtggtccgtggaaaaattatcttccccaaaactggtccctggtgccaaaaaggttggggactgctgctctaggggttggggagggcagagggcttgggccatcaccaggcaggttttatagcagatggtgggggtgccctgcctatagctcctctaaataacgactctggtgcacactagccagctttgccagtggccgcccctctgtctttctgcctgaggactctagcttgtcactggtgcctcctttgccagcctctggcaggcctgaagggctggagaatgaacacatccttggagcaaccttcaaccaatgactgataaatacccccactcccacagcccgcatccctcacccctcgggtgggataactcagaggtgcgtgctccacactgactcccagggccgcccagcagggctgagcctcaaacaccctccccatctcccttcctcatgcccctaccagtgcttcctgggaccacttcccatatgaaccacttgcactcaaacccttgtcttagagtctgctattgggggaacccaaactaaaactggcctctgtacagcaggttgagaggcaatatagcatggtggtcagggacataggctttggagccagagtgcctgggctcaagccctggccccacagtttccttgggcaagtgactgagccattctgtgcctctatttcctcattgataaagtaggcgttgtcgtagcacacacctcatcgagtggtgtggagggttaaagaatatgacacagttaaagtgagtccccaataaatgctgttatttctaagagcatccaaatgtagaggaagtgtgcccctgaggactgagcacaccctgcttttagcctgtcctgcccccagctgaaggtgaaaccttggccgcctgccctcctgaagtcccgccactgctgctgggggttggccaactccgctaccgactgtctctgctctctaagaataggtttccctcacagatggcatctctctggatgctgctagagcatctggtgcttccaactgcacactccagggaggaaggcagtgtggtctgtgccggggagcagggctctgccttccagcagatctgagaggagtcccatttggctccttcctagctgccctccattctctaagacctgtaaaacagggatggccagagggctcttgttgcacagtaagtgctatgcttcctaaatgctagttcctgaaatagaatggtttaacctctacttactaaacacctgctacaatcctgttaattcttttgacatgtaagactaaaataaataaataaataaataaa

SEQ ID NO: 119 - DNA, 1960 bp, Homo sapiens
aggagcagccgcccggggcaccggagctgcgggctgcgtggccgggatgagcgccagcacgggcggtggtggggacagcggcggcagcggcggcagtagcagcagctcacaggcctcctgcgggcccgagtcctcgggctccgaactagccctggccacaccggtgcctcagatgctgcagggccttctgggctccgacgacgaggaacaggaagaccccaaagactactgcaagggcggctaccaccctgtgaagatcggcgacgtgttcaatgggcggtaccacgtggtgcgcaaactgggctggggccacttctccaccgtctggctctgctgggacatccagcgcaagcgctttgtggccctcaaagtggtgaagagtgcggggcattacacggagacagctgtggatgagatcaagctcctgaaatgtgtccgggacagcgaccccagtgaccccaaaagagagaccattgtccagctcattgatgacttcaggatctcaggagtcaatggagtccatgtgtgcatggtgctggaggtgctgggccaccagctcctcaaatggatcatcaagtccaactaccagggcctgcccgtgccctgcgtgaagagcatcgtgaggcaggtgctgcacggcctggactacctccacaccaagtgcaagatcatccacacggacatcaagcccgagaacatcttgctgtgtgtgggggacgcttacatcaggcgcctggctgccgaggccacggagtggcaacaggcaggggcgccgcccccctcccgctccatagtcagcactgccccccaggaggtcttgcagaccggtaagctgtccaaaaacaagaggaagaagatgaggcgcaaacggaaacagcagaagcggctgctggaggagcggctgcgggacctgcagaggctggaggccatggaggctgccacccaggctgaggactctggcttgagactagacgggggcagcggctccacatcctcttcaggctgtcaccccgggggcgccagagcaggtccctccccagcctcttcctcccccgccccagggggcggccgtagcctcagcgcgggctcacagacctcaggcttctccggctccctcttctctcctgcctcctgctccatcctctccggctcgtccaatcagcgagagaccgggggcctcctgtcgcctagcacaccattcggtgcctcgaacctcctggtgaaccccctggagccccaaaatgcagataagatcaagatcaagatcgcagacctgggcaacgcctgctgggtgcacaagcacttcacggaagacatccagactcggcagtaccgggccgtcgaggtgctgatcggcgccgaatacggccccccggcagacatctggagcacagcctgcatggccttcgagctggccactggtgactacctgttcgagccgcattctggagaagactacagtcgtgatgaggaccacatcgctcacatagtggagcttctgggggacatccccccagccttcgccctctcaggccgctattcccgggagttcttcaaccggagaggagagctgcggcacatccacaatctcaagcactggggcctgtacgaggtactcatggaaaagtacgagtggcccctagagcaggccacacagttcagcgcctttctgctgcccatgatggagtacatccccgaaaagcgggccagtgccgctgactgcctccagcacccctggctcaacccctaggcccggctgtggctccacctccagctctccgtgccttaagggaaaagcgggacagctcccaccaccctgctgggcgccagttctccacaaccacagggcagagagacgctggagccaggcccggctctcagagcgtgttctgcctgagacccccgtgagggctctcggagaaagtgtgtgtattcctttcttaataaagtgtggactgaa

SEQ ID NO: 120 - DNA, 1337 bp, Homo sapiens
actctgctcctgcgacctagccaggcgtgagggagtgacagcagcgcattcgcgggacgagagcgatgagtgagaacgccgcaccaggtctgatctcagagctgaagctggctgtgccctggggccacatcgcagccaaagcctggggctccctgcagggccctccagttctctgcctgcacggctggctggacaatgccagctccttcgacagactcatccctcttctcccgcaagacttttattacgttgccatggatttcggaggtcatgggctctcgtcccattacagcccaggtgtcccatattacctccagacttttgtgagtgagatccgaagagttgtggcagccttgaaatggaatcgattctccattctgggccacagcttcggtggcgtcgtgggcggaatgtttttctgtaccttccccgagatggtggataaacttatcttgctggacacgccgctctttctcctggaatcagatgaaatggagaacttgctgacctacaagcggagagccatagagcacgtgctgcaggtagaggcctcccaggagccctcgcacgtgttcagcctgaagcagctgctgcagaggttactgaagagcaatagccacttgagtgaggagtgcggggagcttctcctgcaaagaggaaccacgaaggtggccacaggtctggttctgaacagagaccagaggctcgcctgggcagagaacagcattgacttcatcagcagggagctgtgtgcgcattccatcaggaagctgcaggcccatgtcctgttgatcaaagcagtccacggatattttgattcaagacagaattactctgagaaggagtccctgtcgttcatgatagacacgatgaaatccaccctcaaagagcagttccagtttgtggaagtcccaggcaatcactgtgtccacatgagcgaaccccagcacgtggccagtatcatcagctccttcttacagtgcacacacatgctcccagcccagctgtagctctgggcctggaactatgaagacctagtgctcccagactcaacactgggactctgagttcctgagccccacaacaaggccagggatggtggggacaggcctcactagtcttgaggcccagcctaggatggtagtcaggggaaggagcgagattccaacttcaacatctgtgacctcaagggggagacagagtctgggttccagggctgctttctcctggctaataataaatatccagccagctggaggaaggaagggcaggctgggcccacctagcctttccctgctgcccaactggatggaaaataaaaggttcttgtattctca

SEQ ID NO: 121 - DNA, 16357 bp, Homo sapiens
ctgagcgccgcgggcctgcgccattgaggagcggcggggaggaaacgccgcgcagcgccgggctggggcgggcggcccgggacaccgacagatttttctgtgaccatgaaagagagaaataaagaatgatccatgatttctaaacaccttttcctgaggatatagtcatgttggaaggccttgtagcctgggttctcaatacctatttgggaaaatatgtcaataacctgaacactgaccagctctcagttgcacttctcaaaggtgctgttgaattagaaaacttgccattaaagaaagatgccttgaaagaattggaattaccatttgaagtcaaagctggcttcattgggaaagtaacccttcagattcccttttatcgcccccatgtggacccttgggtgatctccatctccagccttcacttaattggagccccagagaaaatacaggatttcaatgatgaaaaggagaagctgttggaaagggaacgtaagaaagcactacttcaagccctggaggagaaatggaagaatgaccgccagcagaaaggggagtcctattggtattcagttaccgcctccgtagttacaaggattgtggagaatattgaattaaaaattcaagatgtccatttacgctttgaagatggtgtcaccaatccctcccatccttttgcttttggcatctgcattaagaatgtgtccatgcaaaatgctgtgaatgagcctgtacagaaactaatgcggaaaaagcaattagacgtagcagaatttagcatctattgggatgtcgattgcactttactgggggatttgcctcagatggagttacaggaggccatggccaggagcatggagagtcgcagccatcactacgtcctggagcctgtgtttgcatctgctcttttgaagagaaactgctccaagaagcccctgcggtctcggcacagtccccgtattgattgtgatattcagctggagaccattcccttgaaactctctcagctgcaataccggcaaatcatggaattcctcaaggagctggaacgaaaggagaggcaggtgaagttccgaaggtggaaacccaaggtggcgatatctaagaactgccgagaatggtggtattttgctttgaatgctaacttgtatgagatcagagagcagaggaaacgttgcacctgggactttatgttgcaccgcgctcgtgatgctgtatcttacactgacaaatatttcaacaagttaaaaggaggcctgctgtccacagatgacaaggaggaaatgtgtcggattgaagaggaacagagctttgaggaattgaagattttgcgtgaactggttcatgatcgatttcacaaacaggaagaactagcagagagtctgcgggagcctcagtttgattctccaggagcctgtccgggagccccagaacccggtggaggcagtgggatgctgcagtatctccagtcctggtttcctggatggggtggctggtacgggcagcagaccccagaagggaatgtggttgagggactgtcagcagagcaacaggagcagtggattcctgaagagatcctgggcactgaggagttttttgaccccactgcagatgcctcgtgtatgaacacgtatacaaagcgagatcatgtctttgccaaactgaatttgcagttgcagcgaggtacagtgactctgttacacaaggagcaaggaactcctcaaatgaatgaaagtgctttcatgcagctcgagttttcagatgtaaaacttctagcagagtctcttcctcgaagaaattcctcgttgctttcagtccggttgggtggactgtttcttcgagacctggctacagaaggaactatgtttcctcttctagtcttccctaatccacaaaaagaagttggcagagtctcacaatcttttggtctacaaactacatctgcagacagaagtgatcattacccagctgcagatccagatggccccgtttttgagatgctgtatgagagaaatccggcgcacagccactttgagaggcggctcaatgtcagcacaaggcccttgaacatcatatacaatccgcaggccattaaaaaagtagcagactttttctacaagggaaaggttcatacctcaggttttggttatcagtctgaacttgagctgagagtggctgaagctgcccgaagacaatataacaagctgaagatgcagaccaaggcagaaatccggcaaactcttgatcgtttgctagtgggtgatttcattgaggagagtaaacgatggaccgtgcggctggatatttctgcccctcaggtgatatttcctgatgatttcaaattcaagaatcctgtgttagttgtcgtggatctaggaagaatgcttttgacgaacacccaagataactccaggaggaaaagtagggatgggtcagcatctgaagagacccagtttagtgatgatgaatataagacccccctggccacacctcctaacaccccacctcccgagtcaagcagcagcaacggagagaaaacacctcccttttctggagttgagttcagtgaagaacagcttcaagcacatttaatgagcacaaagatgtatgagaggtactcgctgtcatttatggacctccagatcatggttggacgagtgaaagacaattggaagcatgtccaggatattgacgtgggaccaacacatgtggtagagaagttcaacgttcacctacagttagagcgtcgattgatttatacttcagatcccaaatatccaggagccgtgctctcaggcaacttaccagacttaaaaatccacattaatgaagataaaatatctgcactaaagaattgctttgctctcctcaccaccccagaaatgaaaacttctgacactcagattaaagaaaagatttttccccaggaggagcagcggggaagtttgcaagactccgtaatgaatttaacccagagcattgtgttgttggagcagcatacccgcgaggttctggtggagtcgcagctcctcctggcggaatttaaagtgaactgtatgcagcttggtgttgagagcaatggccggtacatttctgtgctcaaggtgtttggtaccaatgctcactttgtgaagaggccttatgatgctgaagtctccctaactgttcatggtttgctcctggtggataccatgcagacatatggtgctgattttgaccttttgatggcttcacataagaacttgagctttgatattccaacgggaagccttcgggatagcagggcccagtctcctgtctctggaccgaatgtggcccacttaactgatggagctacactgaacgaccgatcagctactagtgtttcacttgacaaaattcttaccaaagagcaagagtcccttattaagttggaatatcagtttgtgagttcagagtgcccatcgatgaatttagacagtactcttcaggtgatttccctacaggtgaataatttagatattatcctcaatccagagacgattgtggagctaattggttttcttcaaaaatcctttcccaaggaaaaagatgatttaagtcctcaacctttaatgactgattttgaaagaagcttcagagaacaaggaacttaccagtctacatatgaacaaaacactgaggttgcagtggaaatccataggctgaacttactgcttcttcggacagtgggcatggcaaatagagagaaatatggcagaaaaattgcaactgcaagtataggtggcaccaaagttaatgtctcaatgggtagcacgtttgacatgaatggttctcttggctgtttacagcttatggatttgacacaagataacgttaaaaaccagtatgttgtcagcattgggaattctgtaggctatgaaaatatcatcagtgatattggctactttgaatctgtgtttgtcagaatggaagatgcagccctcactgaagctttgagtttcacgtttgttgagagatctaaacaggagtgttttctcaacctgaagatggcttctttacattataaccactctgctaagtttttgaaggagttgacgttatccatggatgaactggaagaaaattttcgaggtatgctgaaaagcgcagccaccaaagtcaccacagtactagctaccaagactgccgagtatagcgagatggtatcgctctttgaaactccaaggaagactcgggaaccctttatcttagaggaaaatgaaatatatgggtttgacctagcttcgtctcatttggacactgtaaagctaatcttgaacataaacattgaatcaccagttgtttctatccctcggaagccggggagtcctgagttgttggtgggacacttgggacagatattcatccagaattttgtggcgggagatgatgaatccagaagtgaccgtctgcaggtggaaatcaaggacattaaactgtattctttgaattgcacccagttggcaggtagagaagctgttgggtctgaaggaagccggatgttttgcccaccttccgggtctggcagtgccaacagtcaggaggaagctcatttcacacgacatgatttctttgaatctttgcatagaggtcaagcttttcacatcctgaacaacaccaccattcagtttaaactggagaagatccctatagagagagaatctgaattgactttttctcttagcccagatgacctgggaacttctagcatcatgaagattgaaggaaaatttgtcaatccagttcaggtggtgttagcaaagcatgtatatgagcaggttttacaaaccctggacaatctcgtgtacagtgaagatctgaataagtatccagccagtgctacctcctccccttgccctgattctcctctgcctcccctcagtacctgtggagaatcttctgttgaaaggaaggagaatggattgttcagccactccagcctttctaacacctctcagaagtcattgtcagtgaaggaagtcaaatcctttactcagattcaagccaccttttgtatatcagagcttcaggttcagctaagtggagatctgactttgggggcccaaggtcttgtgagcttaaagtttcaggactttgaggtggaattcagtaaagaccatccccagactttatctattcagattgccctgcattctctgctgatggaggacttattggagaagaatccagattctaaatataagaacctgatggtgtctcgaggagcccctaagccatctagtttagcacaaaaagaatacctttctcagtcttgcccctcagtgtccaatgtggaatatcctgatatgcctcggtctctcccttcccacatggaagaagctcctaatgtcttccagttgtatcaaaggcccacctctgcgtcccggaaaaagcaaaaggaagtccaagacaaggactatcccttgaccccacctccttctccaacagtggatgagcccaagatacttgttggaaagagtaaatttgatgattccttagtccacatcaacatattcttggtagataagaaacatccagaattctcttccagttacaatcgagttaaccggagcattgatgttgattttaattgcttggatgtgctgatcacactgcaaacctgggttgtgatattagacttttttggaatcggctccactgcagacaaccacgcaatgaggctgcctcctgagggcattctgcacaacgtgaagttggagccacatgcctccatggagtctggacttcaggatccagtgaacaccaaactggatctcaaggttcattcactttctctagtgctgaataagaccaccagtgagcttgccaaagcaaatgtgtccaaattagtagcacacctggaaatgattgagggagacctggccttacagggcagcattgggagtctgtctctaagtgacctcacatgccatggagagttctacagagaacggttcactaccagtggtgaagaagcactcatcttccagacttttaaatacggacggcctgaccctctgctccggagagaacacgacattcgcgtgagcctccggatggcctctgtgcagtatgtgcatactcagcgtttccaggcagaggtggtggccttcattcagcatttcactcagctgcaggatgtcttagggcgccagcgagctgctattgaggggcagacggtgagagatcaagcccagcgctgttcacgggttctcctggatattgaggctggtgctcccgttctcttgatcccagaaagttccagatcaaataatctgattgtagcaaatttggggaagttgaaagtcaaaaataagtttctgtttgctggttttcctggcaccttttccctacaagataaggaatctgtgccttcagcttccccaacgggtattcccaaacacagtctgaggaaaacgacaagcacggaggagcccaggggaacccattcccaggggcagttcacgatgcctcttgctggaatgagcctaggaagcctgaagagtgagtttgtgcccagtacctccaccaagcagcaagggccgcaacccacactgtctgttggccaagagtccagtagtccagaagaccatgtctgcctgctggattgcgttgtcgtggatctccaggacatggacatctttgctgcagagagacatccgagagaatactcgaaggcaccagaggatagtagtggagatctgatcttcccttcctattttgtgcgacagacaggaggaagcctcttaaccgagccttgtaggctgaaattgcaggtggaaaggaatttggacaaagaaataagtcatactgtgccagacatatctatccatggcaatctctcctcagtccactgctctctggatctgtataaatacaagctgatccgcggcttattagagaacaacctgggagaacccatagaggaatttatgcggccttatgatttacaagatccaagaattcatactgtcctgagtggagaagtgtacacctgtatgtgcttcctcattgatatggtgaatgtaagtctggagcttaaagatccaaaaagaaaagaaggtgctgggtccctagccagatttgacttcaagaaatgcaaactgctctatgaaagtttttccaaccaaaccaagtccattaacttggtttcccattccatgatggcttttgacacccgttatgctgggcagaagaccagccctggcatgacgaatgtgttcagctgtatctttcagcccgctaagaacagcagcaccacccaagggtccattcagattgaactacatttcagatctaccaaggattcctcctgctttacagtagttctcaacaatctccgtgtgtttctcatatttgactggctactgttagtccatgattttctccacactcccagtgatattaagaaacaaaatcatgttactccttctcgccaccgtaactctagcagcgaatctgctatagttcccaaaactgtgaagagtggagtagttaccaagcggtcttcccttcctgtgtccaatgaaaggcacctggaggtcaaggtcaatgtaacaggtacggagtttgtggtcattgaagatgtgtcctgcttcgacaccaatgccattattctgaaaggcaccacagtgctcacctataagccccggtttgttgatcgccccttttcaggaagtttgtttggcattgaggtgttttcatgccgactagggaatgagcatgatacagctctttcaattgtggatcccgtacaaattcaaatggagttggtggggaattcttcttatcaaaatagttcaggattgatggatgcattcaatagtgaagatttcccacctgtcctggagattcagttacaagccctggatatcagactctcctataatgatgttcagctgtttcttgccattgcaaaatccatcccagagcaagctaatgctgcagtgccagactcagtggccctggagtcagactccgttggcacttaccttccaggtgcatctcgcgttggagaggaaatcagagaagggacaagacacaccttagatcctgtcttggagttacagctggctaggctgcaggagctgggattcagcatggatgattgtcgcaaagctcttttggcgtgtcaaggccaattgaaaaaggcagcaagttggttgtttaagaatgcggaacctctgaagtctctttccttggcctccaccagccgagatagcccaggggctgtggcagcgccattgatctctggcgtggagatcaaagctgagagtgtgtgcatctgtttcatcgatgactgcatggattgtgatgttcctctcgctgaactcaccttttcccgtctgaattttcttcagcgtgtaagaactagccctgaaggctatgcccacttcaccctttctggagattattataaccgtgctctttcaggctgggagccatttattgagccttggccatgctctgtatcctggcaacagcaggcagctagtcgtctccatcctcctcgactgaagctagaagccaaggccaaacctcgtttggatatcaatatcacttctgtgctaattgaccagtatgtaagtaccaaggaatcgtggatggcagattactgtaaagatgacaaggacatagagtcagctaaatcagaagactggatgggctcttcggtggatcctccatgttttggacaaagcctcccccttgtctaccttagaactaggagtacagccagtctgactaacctagagcaccagatctatgctagagcagaggtgaaaacccccaagcgccggcagccatttgtcccctttgctctgaggaaccacacggggtgcactttgtggtttgccaccctgaccaccacacccaccagagctgcactctctcacagtgggagtccaggggtagttccagaagggaacggaacatttctcgatgatactcacaatgttagtgaatggcgagaagtccttacaggtgaagagattccctttgaatttgaagcaagaggaaagttaagacacagacacacccatgacctccggattcatcaactgcaagtgagagtaaatggctgggagcaagtgagcccagtgtctgtggacaaagtcgggaccttttttcgatatgcagcaccagataaaaattcatcttcctctacgattggcagcccaagcagcagaacaaatattatacatccccaggtttatttctcttcactcccaccagtgcgggtggtctttgcagtgactatggaaggcagtgcacggaaagtcatcactgtccggtcagccctcattgtgaggaacagacttgagacaccaatggaactaagactggatagcccatcagctccagacaagccagtggtgcttcctgctatcatgccaggggattcgtttgctgtgcctttacacctcacttcttggcggctacaggcccggcccaaaggattgggtgtatttttctgtaaggctcccattcattggaccaatgtagtgaagactgcagaaattagtagcagtaaacgagagtgccactctatggacacagaaaaaagccgatttttcaggttttgtgtggctataaagaaagagaattatccagattatatgccctcaaacatattttctgacagtgcaaaacagattttcagacagcctgggcataccatatatctcctgccaactgtggtaatctgcaacttgctaccctgtgaacttgatttttatgttaaaggaatgccaattaatgggacgctgaaacctggcaaggaggcagctctccatacagctgatacatcccagaacattgagctgggggtatcactggagaatttccccctctgtaaagaattgctcattccacctggaacccaaaactatatggtgagaatgcgactctatgacgtcaaccgtcggcagctgaacctcaccatccggattgtgtgtcgagcagaaggatccttaaagatcttcatttctgctccatattggctgattaacaaaacagggttgccactgatcttcagacaggacaatgccaagacagatgctgcaggccagtttgaggagcatgagctggcccgtagcctgagtcctctcttattctgctatgctgacaaagagcagccaaacctctgcacgatgagaatcggaagggggattcatccagaaggcatgccgggctggtgtcagggcttctccctggatggtggtagtggtgtccgagctttgaaagtcatccagcaaggaaaccgcccagggctgatctataacattggtattgatgtcaagaaaggccgaggtcgatacattgatacctgcatggtcatctttgccccccgttacctgttagataataaatcatctcacaagcttgcatttgcacagagggaatttgccaggggacagggaacagccaatcccgaaggttacatttccacccttcctggttccagtgtggtgttccactggcctcggaatgactatgatcagctattgtgtgtcagactgatggacgttcccaattgtatttggtctggaggctttgaagtcaacaagaataattccttccatatcaacatgagggataccttgggaaaatgcttcttcctacgagtggaaattactctccgaggagctacgtataggatctcatttagtgacacagatcagttacctcctcctttccgaattgacaacttttctaaggtcccggttgtctttactcagcatggcgtagctgaacccaggctccggactgaagtgaagcccatgacttcattggattatgcctgggacgaacccaccttgccaccttttatcactctgactgttaaaggggcagggtcctctgagatcaactgcaacatgaatgatttccaggataatcggcagctttattatgaaaatttcatttacattgctgctacatatacattctctggcttgcaggagggaacaggcaggcctgtggcttccaacaaggccattacctgtgcggagctcgttttggatgtctcacccaagacacaaagagtcattttaaaaaagaaggaaccaggaaagcgttctcagctgtggaggatgacaggaacaggaatgctggcccatgagggctcctcagttcctcacaatcccaataagccctcagccgcccgctccaccgaggggtctgccatcttagatattgctggtctcgctgcagtgactgacaacagatacgagccactgatgctgagaaagcctgaccgcaggcgaagcacaactcagacgtggagtttccgagaaggaaaactgacctgtgggttacatgggttggtcgtccaggccaaaggaggactttctggtttgtttgatggagctgaagttgttcttggtcctgacacttccatggagcttttggggccagttccacctgaacaacaatttattaatcaaaaaatgagacctggttctggaatgttatccatcagagtcatcccagatggaccaactagagcactccagataacagatttctgccaccggaaaagcagccgttcatatgaagtggatgaacttcctgtcaccgaacaagagctgcagaaattaaagaatccagatacagagcaggaattggaagtgcttgtgaggttagaaggtggaattgggttgtccttaattaataaagtcccagaagaactggtctttgcaagtcttacaggaatcaatgtgcactatacacagctggcaaccagtcacatgcttgaactcagcatacaggatgtacaggtggacaatcagctcattggtaccacgcagcccttcatgctctatgtgactcccctgagcaatgagaatgaggtcatcgagaccggcccagctgtgcaagtcaacgcagtgaagttccccagtaagagtgcactgaccaacatctacaagcatctgatgatcacagctcagagattcacagtgcaaattgaggagaaactgctcctcaagctgctaagtttctttggctacgatcaagcagaatcagaggtggaaaaatatgatgaaaacctccatgaaaagacagctgagcaaggtggaacaccaattcgatactactttgaaaatctcaaaatcagcattcctcagatcaagctaagtgtgttcacctccaacaagctcccattggatcttaaggccctaaaaagcaccttggggtttcctttgatacggtttgaagacgctgtgattaatctagatccattcactcgggtacatccctatgagaccaaggagttcatcatcaatgatatcctcaaacatttccaggaggaactcctcagccaggcagctcgaatcctgggatcagtggattttcttggcaatcctatggggcttttgaatgatgtttctgaaggggttactggactgataaaatatggaaatgtcgggggcctcatcagaaatgttacacacggagtatcaaactctgctgccaagtttgctggaacattatcagatggcttagggaagacgatggacaatcggcatcagtcagagcgggagtacatcaggtaccatgcagccacaagtggtgaacaccttgtagccggcatccatggcctggctcatggtatcattggtggactgaccagtgttataacttcgacagtggaaggtgtgaaaacagaagggggtgtcagcggtttcatatctggccttggaaaagggcttgttggcactgtaaccaagccagtggcaggcgccctggattttgcatcagaaacagcccaggcggtgagagacacagccacactcagcggccccaggactcaagcacagagggttcggaaaccgcgttgctgcacggggccccaggggctgcttccccgatattctgagagccaggcggaaggacaggagcagctcttcaaactcacagacaacatacaggacgaattcttcatcgctgtggagaacattgacagctactgcgtgctcatctcctccaaagctgtttacttcctgaaaagtggagactacgtggatcgagaagccattttcctagaagtcaaatacgatgacctctaccactgccttgtctccaaagaccatgggaaggtgtatgtgcaggtgaccaagaaagccgtgagcacgagcagtggagtgtccatccccggcccctcccaccagaagcccatggtccatgtgaaatctgaggtccttgctgtcaagttgtcacaagaaataaactacgcaaagagcctctactatgaacagcagcttatgttaagactcagcgaaaaccgagagcagctggagctggactcctgaagccccgctgctgagatgggcgctcccgacacagcgcagacccaccaggaggaaagaggcccagctctcagctgacgatggaggcagaaccggagtcgggtttggggaagttgtcaaggaatgagggaaagtaaatcctcatgaggaaaagtacaaatggaaatcgtattaatttgtgaggcagggagttattttagattatgggaaataatttttaaaggtattggttaaataacgtttaaaaacatgtactgagatgaatctaatttttagattgccctgtattttgttaacatgtatatatgtacaacagtgtgtttgtaaatatataggaacgtttctgaacagggtctgtgctatgtgtaaaggtttgttaactgtaaagtaatataaagttatattggatcttctattgcactaattctagatgtctaattcaggatactgtctatagaaaggcattcttaaaagttaaagaatgttacgtcttagttttggagactaaagtattcccagtaaagtgggttgaggtgagggctgtggtcctgaaagggacgcctttgacatcgtggctgtccagttgggctgtgagctgtggcacccaggactggcgctggcccttcagaaggatctaggagaggggcttgggagcccacttttaatttctcacccccattttacaaagagtgcttagattcttacaaattatgatgtaagttatccatttggctttttcctaactagtcttaccaaacttagggggaaacctgtgctccattaccacatgggtgcaagtcagcattgtaagttttctcaggttattattattagagaggttggaaacattggtaaactctgttgattgagaaggaaaaaaaaagtcccattgaactgttgcaacaaatcagaaatccacataaaagtgctctcctgcctgggcagcaacaaccaagaacaaagccccgggactgttttctttttaataaagccacaggcaggcatcgtagctccacagcccgaggggacacaggatggaaaccccaggatgagaagggagcagggagagttccagaaagggggatgaaataggagtattaaaaagctgcgttggtaagtttttcatggaaccaagatttgacaaaggcatctcttatccttggttttaaattcctgctgggagcaaggcctggtatgagcgccctgggtcttgtttttggtgtttcgcttttctgtaaggattaagcagatagggagaagggaaaaggggcctcactttagaatgaatgagtcaccttgtgatttttaaatttttattttaataaagctaatcaatttctacaaccttgtcacatgtagctgagtctgggatgactcagtggatcagtggatgcgtggaaggttttggtgtttataactcatgacccaaatccttccaagacacaaatgaagctaatcttcttcccctccctttcctctcccacttcccctctgtgtctgtgtctgtgtgtgtgtgtgtgtgtgtgtgtgtgtgcgcgcgcgcgcgtgcatgcagagaggaaggaagggagctttagcacaagtagctacatagtgttcaaggatcagctttcttgaactccgaggcttggttgcctttgctgaactccaagttagtggattgcagaatggaaacttggcttttgcggcactgggtgagttttagtttgtgtgtgtcttgctggggggtggtgatgattgtctcagcactcacgcactgcacaagatggcagcaggatacagcactgcacaagatggcagctcctctgcagcttcctcctcagcctccctccttgcacccccacaggtttggcttgtggtttttgtcatcagtaacctactgcctgagatcatgatctcttaaaagatgagactctcggaagggttgattgtatgcgtcagtgagccttctatcaccttctggaacaaagtcacttgaaatctcttgatgagattaaggagtttagtgttactaagaaaatctgctttgggccgcagcagtgctgggtgttctcagacctgactgaggaagttagctgcgggctgccctgtgggctggtgcttcaggaggaatccagagaagtgttcagatgccccccttgggctcctttctaattttaatcagctctttaaatagctgcccatctcctgtgattgcacaaccaagcactttgacatttgcaccttaggagaggcagatgttaaaatggaatccaaagaccacctagggcggggctgggtgggagatgggagggccaactgcgagctgctccacttctcagctctcccctgccctgcagccctgggccagacaaggccagaaggtttcaggggcatttgacatcccctcctggttctcaccaggaaaacatccaaagctttggaggaaacaggccctgcccctggctccttaaatgccccgtctctttgtaaactgatattcagccagcaatgcctaagactttgttaagatcatttctactgcttttctttctgcttcaaacacacagttcgtctctgaggaaagtaaaataaatggaataagagtaaattgggtaaggagatatccaaagctacccagtcccttgacccagcacagttggccgacccgtgtcactccctggctgtcgctgcttctctgtgctcactgaagggtgagccaggccagtgcttccccagcccctgggcctggtcactacacagtggaaaacagacaagcggccccttccccaaatcccaagagtgtcttgctgcttggtgggtgctcatcgcaatgttctgaaggctccagggccactttgtttgtaagtatgatctgggcctcaaaataccatagtagctgcttgataaaattctaaaaatatctggttctctattatgtaaacactattacagtcaccagtgtgtgaagactcttgagtctggttctcatatcagagtcatcatttttcttcctgtggaataaaatgccttgtggacttcccaaa

SEQ ID NO: 122 - DNA, 8097 bp, Homo sapiens
atttcctataaatatcacaaatatttccaacaaaagagcatagatgtcttttatacaattcttttgagaatgattctgcagatttctgcattttctcctcattaatttgacctgggatggttttcactgaggaaaaaaatctttaagcaaacatgttaaatgtttacctatataaaaattattacttcaggtgactccgataatataacgcatgtgtggaatgaggatgatggacagaccttatctccaagcagtctggctgcacagctcctaattctggaaaactttgaagatgccctcttaaatatatcagcaaatagtccttatattccttacttggcatgtgtgagaaatgtgactgacagtttggccagaggttcaccagaaaatctaagactcctgcagtccacaatacgatttaaaaaatcttttcttcgcaatggttcctatgaagattactttcctccagttcctgaagtcctaaaatcaaaactgtctcaacttcgaaacttgaccgaacttctttgtgaatctgaaactttcagtttgatagagaagtcatgccagctctctgatatgagctttgggagcctgtgtgaagaaagtgagtttgatctgcaactcctcgaagcggcagagctgggcaccgaaatagcagccagcttactgtaccatgacaatgtcatatctaaaaaagtgagagatttgctgactggagatccaagcaaaattaatttaaatatggatcagtttctagaacaggcactgcaaatgaattacttggaaaatatcactcagttaataccgatcatagaagccatgctgcatgtcaataacagtgcagatgcttctgaaaagccaggtcagttactagaaatgtttaaaaatgttgaagagctgaaagaagatttaaggagaacaacaggaatgtccaacaggactattgacaagttgctggccattcccatccctgataatagagctgagattatttctcaggtgttctggctgcattcctgtgatactaatatcaccactcccaaactagaagatgcaatgaaagaattctgcaacctgtctctttcagagagatcccggcagtcttacctcatcggactcacccttctgcactacttaaacatttacaacttcacatacaaggtgtttttcccgaggaaagatcaaaagccagtagaaaagatgatggagctcttcataagactaaaagagattctcaatcagatggcttctggcacacatccgctgctagacaaaatgagatccctgaagcaaatgcatctgcccagaagtgttccattaacacaggcaatgtacagaagcaaccgaatgaacacaccacaaggatcatttagcaccatctcccaagcattatgttctcaaggaattaccactgaatatttaactgccatgctgccctcttcccagaggccaaaaggcaaccacaccaaggattttttgacttataaattaactaaagagcaaattgcttcaaaatatggaattcccataaattccacaccattttgcttctccctttataaagacatcattaacatgcccgctggacctgtgatttgggctttcttgaaacctatgttgttgggaagaattttgtatgcaccatataacccagtcacaaaggcaataatggaaaagtccaatgtaactctgagacagctggcggaattaagagaaaaatctcaagagtggatggataagtcgccacttttcatgaattccttccatctgttaaaccaggcaattccaatgctccagaatactctaaggaacccttttgtgcaagtttttgtaaagttctccgtgggactcgatgctgttgaactattgaaacagatagatgaactcgatattctaagactgaaattagagaacaacattgacatcatcgatcagcttaacacactatcttccctgacagtaaatatttcctcttgtgtattatatgaccgtattcaggcagcaaaaaccatagatgaaatggagagagaggctaaaaggctctacaaaagcaacgaactctttggaagtgttatttttaagcttccttctaacagaagctggcacagaggctatgactctggaaatgtctttcttcctcctgtcataaaatataccatccggatgagtctcaagaccgcacagaccacaagaagcctaagaaccaagatttgggctccagggccacacaattctccatcacacaaccagatctatggcagggcttttatttatttacaggatagtattgaaagagcaatcattgaattgcaaactggaaggaactcccaggaaatagcagtccaggttcaagcaattccttatccctgcttcatgaaagacaacttcctaaccagtgtctcttattctcttccaattgtgcttatggttgcctgggttgtatttatagctgcctttgtaaaaaagcttgtctatgagaaagacctccggcttcatgagtacatgaagatgatgggtgtgaactcctgcagccatttctttgcctggcttatagagagtgttggatttttactggttaccatcgtgatcctcatcattatactcaagtttggcaatattcttcctaaaacaaatgggttcattttgttcctgtatttttcggactacagcttctcggttattgccatgagctatcttatcagtgtcttcttcaacaacaccaacattgcagctctgatcggaagcctcatctacatcattgccttctttccatttattgttctggttacagtggagaatgagttgagctatgtattgaaagtgttcatgagcctgctgtccccaacagcattcagctatgcaagccaatacattgcacgatacgaagaacagggcattggtcttcagtgggaaaatatgtacacctccccggttcaggatgacaccacctcatttggctggctgtgctgtctaatcctagctgactctttcatttatttccttattgcttggtatgtcaggaatgtcttcccagggacatacggtatggcagctccctggtattttccaattcttccttcctattggaaggagcgatttgggtgtgcagaggtgaagcctgagaagagcaatggcctcatgtttactaacatcatgatgcagaacaccaacccatctgccagtcctgaatacatgttttcctctaacatcgagcctgaacctaaagatctcacagtcggggttgccctgcatggggtcacaaagatctatggctcaaaagttgctgttgataacctcaatctgaacttttatgaagggcatattacttcattgctggggcccaatggagctgggaaaactactaccatttccatgttaactgggctgtttggggcctcagcaggcaccatttttgtatatggaaaagatatcaaaacagacctacacacggtacggaagaacatgggagtctgtatgcagcacgacgtcttgttcagttacctcactactaaggagcaccttctcctatatggttccatcaaagttcctcactggactaaaaagcagctccacgaggaagtaaaaaggactttaaaagatactggactatatagccatcgtcataagagagttggaacactgtcaggaggcatgaagaggaagttatctatatccatagctctcattggtggatcaagggtagtaattttggatgaaccatctactggagttgacccatgttctcgccgaagtatatgggatgttatatccaagaacaaaactgccagaacaatcattctgtcaacgcaccacttggacgaggctgaagtgctgagtgaccgcatcgccttcctggagcagggtgggcttaggtgctgtgggtccccattttacctcaaggaagcctttggcgatgggtatcacctcacgcttaccaagaagaagagtccaaatttaaatgcaaatgcagtatgtgacaccatggccgtgacagcaatgatccaatcacatctccccgaagcctacctcaaggaggatattgggggagagcttgtttatgtacttcctccattcagcaccaaagtctcaggggcctacctgtcactcctacgggcactcgacaatggcatgggtgacctcaacatcgggtgctacggcatttcagataccaccgtggaggaggtctttctgaacttgaccaaagagtcacaaaaaaatagtgctatgagtcttgagcacttaacacaaaagaaaattgggaattccaatgccaatggcatctcaactcctgacgatttatctgtgagcagcagcaatttcacagacagagatgacaaaatcctgacaagaggagagaggctggatggctttggactgttgctgaagaagatcatggctatactcatcaagaggttccaccacacccgcaggaactggaaaggtctcattgctcaggttatcctccccatcgtctttgttaccactgccatgggccttggcacactgagaaattccagcaacagttatccagagattcagatctccccctctctttatggtacctccgaacagacagccttctatgctaattatcacccgagcacggaagcacttgtctcagcaatgtgggacttccctggaattgacaacatgtgtctgaacaccagtgatctacagtgtttaaacaaagacagtctggaaaaatggaacaccagtggagaacccatcactaattttggtgtttgctcctgctcagaaaatgtccaggaatgtcctaaatttaactattccccaccgcacagaagaacttactcatcccaggtaatttataacctcactgggcaacgagtggaaaattatcttatatcaactgcaaatgagtttgtccaaaaaagatatggaggttggagttttgggctgcctttgacaaaagaccttcgttttgatataacaggagtccctgccaatagaacacttgccaaggtatggtatgatccagaaggctatcactcccttccagcttacctcaacagcctgaataatttccttctgcgagttaacatgtcaaaatacgatgctgcccgacatggcatcatcatgtatagccatccttatccaggagtgcaagaccaagaacaagccacaatcagcagtttaatcgatattttagtggcactgtctatcttgatgggctactctgtcaccaccgccagctttgtcacctatgttgtaagggaacatcaaaccaaagccaaacagttgcagcacatttcaggcattggcgtgacatgctactgggtaacaaacttcatttatgacatggttttctacttggtgcctgtagcgttttcaattggtatcattgcgattttcaaattacctgcattctacagtgaaaacaacctaggcgctgtatctctcctacttctcctgtttgggtatgcaacattttcctggatgtacttgctggctgggctcttccatgaaacaggaatggccttcatcacttacgtctgtgtcaacttgttttttggcattaattccattgtttccctgtcagtggtatactttctttccaaggaaaagcctaatgatccgactttagaacttatttctgaaaccctcaagcgcattttcctgattttcccacaattctgttttggctacggtttgattgaactttctcaacaacagtcggtcctagacttcttaaaagcatatggagtggaatacccaaatgaaacctttgagatgaataaactaggtgcaatgtttgtggctttggtttctcagggcaccatgtttttttccttgcgactcttaatcaacgaatccctgataaagaaactcaggcttttcttcagaaaatttaattcttcacatgtaagggagacaatagatgaggatgaagatgtgcgggctgagagattaagagttgagagtggtgcagctgaatttgacttggtccaactttattgtctcacaaagacctaccaacttatccacaaaaagattatagctgtaaacaacatcagcattgggatacctgctggagagtgttttgggcttcttggagtgaatggagcaggaaagaccactatattcaagatgctgacaggagacatcattccttcaagtggaaacattctgatcagaaataagaccggatctctgggtcacgttgattctcacagctcattagttggctactgtcctcaggaagatgccttagatgacctggtaactgtggaagaacatttgtatttctatgccagggtacatggaattccagaaaaggatattaaagaaactgttcataaactccttaggagacttcacctgatgcccttcaaggacagagctacctctatgtgcagttatggcacaaaaagaaaattatccactgcactggccttgatagggaaaccttccattctactgctggatgagccgagctctggcatggatccgaagtcgaaacggcacctctggaagatcatttcagaagaagtacagaacaaatgttccgtcatcctcacatctcacagcatggaagaatgtgaagctctctgtaccaggttggccattatggtgaatggaaagtttcaatgtattggatctttgcagcacataaagagcaggtttggacgaggatttactgtcaaagttcacttgaagaataacaaagtgaccatggagaccctcacaaagttcatgcagctgcactttccaaaaacatacttaaaagatcagcacctcagcatgctagagtatcatgtaccagtcacagcaggaggagtcgcaaacatttttgatctgctggaaaccaacaagactgctttaaatattacaaatttcttagtgagtcagaccactctggaagaggttttcatcaactttgccaaagaccagaagtcctatgaaactgctgataccagcagccaaggttccactataagtgttgactcacaagatgaccagatggagtcttaacacttccagcaaactcaatctcagcgtgtgaccaatggcttcattttgaagaaaagccacagaagatacacttccgcaagatatcttcattttaaagtaaagtaatatactgtatggaaagttacaactgtgttagactaacaagtaattataaaaggaaatttttccttctaaggtcagtgagtgttgttgctactgaaatgaattcctgtatactcaacactgtgagcatgctaatgtatatgctggtgattcttatgcaaaggtgaagccacctcaagatgaatatcttaatttattactttcaataaaaagacagtttaaaaggcatggattttggtagttgaaatataagagtggagaagaaaagtcagatggtttgtggcaggtgccaccgggcaagcagacaacataatttatttccagaaaacaacagaatgaacatcatcatgaatacatgaatcggctgtgatgtgtgaactgctaagggccaaatgaacgtttgcagagcagtgggcacaatgtttacaatgtatgtgtatgtcactttcggtacctgtgaatgcatggggacgtgctgaacccgaaaaaaagtgcctttccataaggactgcaatagagagggcaatttaccctggtggtacacggaacctagattcactcctgccatgccttgccaatagtaagctgcagggtggaacaagaaatcacttgctctggggggaagggaggggggaatgggtgtgtcagctgggtagatacaaaccctgaaaagagaatccatgtgctactggcaggcaacattttttaaagctctttcagaaaccctcatatttggggtttcttttcaggaaacattcctgtggagggaaaacgaatatgaagataattttcagctaattatctgggtgacccagaatcgtgtatatggctataggatagacttcttaataatggcaagtgacgtggccctggggaaaggtgctttatgtaccgtgtgtgcgtgtatgtgtgtgtatctatacaagtttgtcagctttggcatgactgtttgtctcgaaaaccaataaactcaaagtttagaaaaactcaaaaaaaaaaaaa

SEQ ID NO: 123 - DNA, 2906 bp, Homo sapiens
agagtcctggctggctctgccaagtgtaacaaactcacagccctctccaaactggctggggctgctgggagactcccaaggaactcgtcaggaaggcaggagacaggagacgggacctctacagggagacggtgggccggcccttgggggggctgatgtggccccaaggctgagtcccgtcagggtctggcctcggcctcaggcccccaaggagccggccctacaccccatgggtttgtcactgcccaaggagaaagggctaattctctgcctatggagcaagttctgcagatggttccagagacgggagtcctgggcccagagccgagatgagcagaacctgctgcagcagaagaggatctgggagtctcctctccttctagctgccaaagataatgatgtccaggccctgaacaagttgctcaagtatgaggattgcaaggtgcaccagagaggagccatgggggaaacagcgctacacatagcagccctctatgacaacctggaggccgccatggtgctgatggaggctgccccggagctggtctttgagcccatgacatctgagctctatgagggtcagactgcactgcacatcgctgttgtgaaccagaacatgaacctggtgcgagccctgcttgcccgcagggccagtgtctctgccagagccacaggcactgccttccgccgtagtccctgcaacctcatctactttggggagcaccctttgtcctttgctgcctgtgtgaacagtgaggagatcgtgcggctgctcattgagcatggagctgacatccgggcccaggactccctgggaaacacagtgttacacatcctcatcctccagcccaacaaaacctttgcctgccagatgtacaacctgttgctgtcctacgacagacatggggaccacctgcagcccctggacctcgtgcccaatcaccagggtctcacccctttcaagctggctggagtggagggtaacactgtgatgtttcagcacctgatgcagaagcggaagcacacccagtggacgtatggaccactgacctcgactctctatgacctcacagagatcgactcctcaggggatgagcagtccctgctggaacttatcatcaccaccaagaagcgggaggctcgccagatcctggaccagacgccggtgaaggagctggtgagcctcaagtggaagcggtacgggcggccgtacttctgcatgctgggtgccatatatctgctgtacatcatctgcttcaccatgtgctgcatctaccgccccctcaagcccaggaccaataaccgcacgagcccccgggacaacaccctcttacagcagaagctacttcaggaagcctacatgacccctaaggacgatatccggctggtcggggagctggtgactgtcattggggctatcatcatcctgctggtagaggttccagacatcttcagaatgggggtcactcgcttctttggacagaccatccttgggggcccattccatgtcctcatcatcacctatgccttcatggtgctggtgaccatggtgatgcggctcatcagtgccagcggggaggtggtacccatgtcctttgcactcgtgctgggctggtgcaacgtcatgtacttcgcccgaggattccagatgctaggccccttcaccatcatgattcagaagatgatttttggcgacctgatgcgattctgctggctgatggctgtggtcatcctgggctttgcttcagccttctatatcatcttccagacagaggaccccgaggagctaggccacttctacgactaccccatggccctgttcagcaccttcgagctgttccttaccatcatcgatggcccagccaactacaacgtggacctgcccttcatgtacagcatcacctatgctgcctttgccatcatcgccacactgctcatgctcaacctcctcattgccatgatgggcgacactcactggcgagtggcccatgagcgggatgagctgtggagggcccagattgtggccaccacagtgatgctggagcggaagctgcctcgctgcctgtggcctcgctccgggatctgcggacgggagtatggcctgggagaccgctggttcctgcgggtggaagacaggcaagatctcaaccggcagcggatccaacgctacgcacaggccttccacacccggggctctgaggatttggacaaagactcagtggaaaaactagagctgggctgtcccttcagcccccacctgtcccttcctatgccctcagtgtctcgaagtacctcccgcagcagtgccaattgggaaaggcttcggcaagggaccctgaggagagacctgcgtgggataatcaacaggggtctggaggacggggagagctgggaatatcagatctgactgcgtgttctcacttcgcttcctggaacttgctctcattttcctgggtgcatcaaacaaaacaaaaaccaaacacccagaggtctcatctcccaggccccaggggagaaagaggagtagcatgaacgccaaggaatgtacgttgagaatcactgctccaggcctgcattactccttcagctctggggcagaggaagcccagcccaagcacggggctggcagggcgtgaggaactctcctgtggcctgctcatcacccttccgacaggagcactgcatgtcagagcactttaaaaacaggccagcctgcttgggcgctcggtctccaccccagggtcataagtggggagagagcccttcccagggcacccaggcaggtgcagggaagtgcagagcttgtggaaagcgtgtgagtgagggagacaggaacggctctgggggtgggaagtggggctaggtcttgccaactccatcttcaataaagtcgttttcggatccct

SEQ ID NO: 124 - DNA, 4061 bp, Homo sapiens
aggctgagaccggtgcgccgcgcgctagtggccgctcttccgcgggctagcgggcggtgggggcgccagcagcgcggaaggcgggcacgcgggccatggctccctgggcggaggccgagcactcggcgctgaacccgctgcgcgcggtgtggctcacgctgaccgccgccttcctgctgaccctactgctgcagctcctgccgcccggcctgctcccgggctgcgcgatcttccaggacctgatccgctatgggaaaaccaagtgtggggagccgtcgcgccccgccgcctgccgagcctttgatgtccccaagagatatttttcccacttttatatcatctcagtgctgtggaatggcttcctgctttggtgccttactcaatctctgttcctgggagcaccttttccaagctggcttcatggtttgctcagaattctcggggcggcacagttccagggaggggagctggcactgtctgcattcttagtgctagtatttctgtggctgcacagcttacgaagactcttcgagtgcctctacgtcagtgtcttctccaatgtcatgattcacgtcgtgcagtactgttttggacttgtctattatgtccttgttggcctaactgtgctgagccaagtgccaatggatggcaggaatgcctacataacagggaaaaatctattgatgcaagcacggtggttccatattcttgggatgatgatgttcatctggtcatctgcccatcagtataagtgccatgttattctcggcaatctcaggaaaaataaagcaggagtggtcattcactgtaaccacaggatcccatttggagactggtttgaatatgtttcttcccctaactacttagcagagctgatgatctacgtttccatggccgtcacctttgggttccacaacttaacttggtggctagtggtgacaaatgtcttctttaatcaggccctgtctgcctttctcagccaccaattctacaaaagcaaatttgtctcttacccgaagcataggaaagctttcctaccatttttgttttaagttaacctcagtcatgaagaatgcaaaccaggtgatggtttcaatgcctaaggacagtgaagtctggagcccaaagtacagtttcagcaaagctgtttgaaactctccattccatttctataccccacaagttttcactgaatgagcatggcagtgccactcaagaaaatgaatctccaaagtatcttcaaagaataaatactaatggcagatctgcgatttctgggtccactttctgagatgctttctaaaaccaaccaactgataaaaagtagatgagacttctccaagctgcttcacaagcaaactaaccgaaaaaccgaaaatatacaaacagcttcacacacacacacacacacacacacacacacacacacacacaaaggaagatcatcaatggctgcggtagcctagtaggaatggactatataataatatagcaggtgctcaataactgtttgttgcatttcagtaaaagcagaataacctttcaaaataataacaggctgggtgcaatggctcacacctgttaatcccagcacttcgggaggccaaggtgggcagttcgcttgggcccaagagttcgagaccagcctgggcaacatggtgaaaccctatctccgtgaaaaaatatgaaaattagccaagagtggtggcacatgcctgtagtcccagatacttgggagtgggctgagatgggagaatcgcttgagcccaggaggtcaagggtacagtgagccgaggtcatgccactgcactccagcctggcctgggcaacagagcaagaccctgtctcaaaataataataatatataattttacaccaaaagtttcaggaaaaaacgagtttgttggagttagtttatactttcacatatcaccacaaagatctccagttaaataactatcaatatccatttccattcatctccccctcaaatcatagcctaacagaacactttgaaagctcttttatttaatatttttttacatcctttgaagggagtgcttcaaaaatgaaagcatcagaagataaaatatttttatatttatgcatagcaagccttcgtgaacggaagtgacacactctggattgaataatactgtagcctcattcatatgtagttattcaaattggattaatgtctgtgtgagtttatttgaactagcagaaagtatctgaagatattcaggaataaagtttatacttaaaatagcttatgttaaagaaaatacctgtgattaattcagagggaaataaatgcatggtataaaagaaaaccaaaaacttaaaaaataatactatagcctgagcaacacattaaaactgcacacttgtgcagcgtaagattctctggcttattggctgaggtgttaagtttattccttttatgaagatgtcctattacagtcagctaagcactaaagctttgcatttatatgtactttgctatgggggaaagaaccttatgattaataagacacatatcaaatgcatagtcaatcattcccacccccatccctggagctgtaacccaaaactgttaaactaagattcctttgttttttttgtttttttgagatggagtctcactctgtcgcccagactggagtgcagtggtgggatcctggctcactgcaacctccgccttctgggttccagcgattctcctctgcctcagcctcccaagtagctgggattacaggcacatgccaccatgcccaggtaattgttgtatttttagtagagatagagtttcaccatgttggccaggctggtctcaaactcctgacctcaggtgatccacctgcttcggcctcccaaagtgctgggattacaggtgtaagtcactgctcccggatgcatgtcaagcacattggaaagttcttacaacaattctgatggaggattttctctcccatcaaccaaacaccacttaagattaacctgtggctcagtctacttaaataaatgccatatttattttacttatcatttagaatttgccattctcaggaacaaaactttttgtacattggaaatggaaaacattgcagtttggtcttaatttccacatgaatatcaagtgtaatttttaataaattatttggagaaaaatgtattttattttagcatgcaattttatgcccaggttagactagagatttggctgatgttctggaatctcattgtactcttaagtaaaataacgagcatcccatgacgcaccctgtcaggggttgtgagaaagctgcagtgtccagtttcccacccctgtttcctgctgtctctctcccactcatccctgtttcttactcatcccttttccttctttgcccaaacatcatatttctaggcaaagataagagaggagatagtgatgtcctgaaaggggttcagaacaacgtagcatggcctttggtgaaagcgtcaccgatgggaaataattgagaattgtgcagtgcttgcagcgtcagaatcagcactgttttttgtgttggtgaaaatattccatgtgcgtaaagggagagcatcagggactttgcaaattcttcacaaggacccagaaatagcttaaagattcatggttttcctgttggcttaaatagccttaatctttcattttctactaccattaagtcggggaaatgacattgaactacctcattagcagccttcccttgattaactactgactaaaagtgtgctgaaaatggcctttgtttttgtgaagctcatcctatacactaacatttgcttaaccatggattattttgtctctacaaagctgtgccctgtattcgatttttacttcaatgagtggttattgctagaattcctacaaaaaaaaaaaaaaccgttgcagatatttttgtatgtagcttaatagatatttagtttaaggagactgcaacatttgcataaggtgcctaaaaactcaagaaccattgataagtgagatcactcaaaatgagctgatatattaaagaagaccttaaaacagtaaa

SEQ ID NO: 125 - DNA, 1978 bp, Homo sapiens
atcactggtgctgcaagtcgctgagctgacagttgtgccgaggactgtcaccattgggcaggcatggtggccagctcctcacttggctgaggtccagggatggacacaggttcgctgaacgcggccagcctgagggaggagcagctccacctgtccttgctggtgtccagcggctggagaacaatcagcttccacgtggtgcccgtggtgagaaggaagcttggggcgcctgccctggagggggtgcagcagatgcccggattccctgagggcagcttgagaaggatcctcagccaaggggtggacctggtgccggccagcgcccagctctggaggacctccactgactacctgctcacgaggctgctgggggagctgggctccctgcagggtcatcgcctggacagcctctccatcctcgaccgggtcaaccacgagagctggcgtgacagtggccagactgacggcctgacctttggccacctgaagatggtgctgctgtgggcctctgtgctcttcccggcgcccgaggactgggcagaactgcagggcgccgtgtaccgcctgctggtggtgctgctctgttgcctggccacgcggaagctgccccacttcctccacccgcagcgcaacctgctgcagggcagcggcctggaccttggtgccatctaccagcgcgtggagggcttcgccagccagcccgaggcggccctgcgcatccacgccacccacctgggccgcagccccccgccgcgcatcggctccgggctcaaggcgctcctgcagctgccagccagtgaccccacttactgggccactgcctacttcgacgtcctgctggacaagttccaggtcttcaacatccaggataaggaccggatctctgccatgcagagcatcttccagaagaccaggactctgggaggcgaggagagctgagctgggccacctggtctcagccacctgttcttggctccccaacagactctgcactgcaccatgggaggctcctgggatgtttggaagaagaaacgggcttctccttgagggggtagtggagggattttgtccccagcagtggcctctgagagtctttcagtgcctggtggggcagggcaggcctcttggagcacctcctccctgggtcagggcctggatgcaggtgccaagctctccatgtggtgcatgttgacccagccacgtggtgttgtcaagcaaacagcatcggcaggagacctggagctgaggacttggccctgcctgcactgtatgccattccttggtgacgaaatgctgtatatttggttttgaaaaaatgaatgtgctgggtatacacagcagaaagggtactgtccactttttgtatatcagtgtggaaaatatttcccctagaagtagaaaaggctcatgtgctgatggataattttgagtcttctccattctctgtgaatgacccccttccccaggcatccccacctcctacctcgttcttagagcaaactaaagccaactgagggtgcacacacagccatgagcccacctgcccaggactactcccatctgcttcttcccgtccccgtggaagtggcccctgatatggattgtatctgtatccccacccaaatctcaggtagaattggatctgtgtccccacccaagtctcaggtagacttgtaatccccagtgttggaggaggggcccagtgggaggtgattggatcatgggggtggatttctcccttactgttctcatgatagtgagtgagttctcatgagatctggttttttgagtgtgtggcccctccccctctccttttgctctcttcctctttctccggccatgtaagatatgcctccttctccttcaccttccaccatgattgtcagtttcctgaggcctcccagccatgcttcctgtatagcctgcgggactgtgagtcaattaaacctctttattcattaaaaaaaaaaaaaaaaaa

SEQ ID NO: 126 - DNA, 3015 bp, Homo sapiens
aaaatcccctgccaggctggccgagcggcaaaaagttcgcgctgctggtcccgcgcgggcggcccctgggctttgtgtccaccaggacagcgggccgggctccctgcaggcgcgggcggcgccgaacggtgctcagcaaccacccggacagggccaggccgttttctcccgctcaggcattagtcgttggctgtgggccgccgcgggaagttgaggcctaccacggaggaggctgctgaggtggatctcaggggatccgcaagggctccctcacccttgccgggaccctgggaacccgaaacaaaatcctacgccaccagcccgccgaatgcgccccctcggccgggggtcctgggtcttcagagaagaactcggccgaatgcggtcagaaagcccgcgaaccgcctggacctgcaggccccgccgcttggagctcccgcctttcccgaccgagcccgtgtctgctcgtgtgtctcactgatgtcttaggtctcaaaaaaaaaagaaaagaaaaggtttttagtagacagaagagaaatggggccgtgggttcgtggtcccagggggaaactgacgtcgcatgaggtcgtcgtccctcagcttgagctcagcggaacataagcttgcagaggtggaaaccacggaaggtttgggtgtcttggagctctctggacaccgaagcccggacacagtcccggggtccgcaccgcctgtgacctgtggcgggaccgccggggtgggcgttttctcagctggcgcgcgcgtaggtggaacttgggaaactaactggagcgaagtggcaaaaaaccaagacagggccggtgacctcgcgcaggccgtccttaactgtggagtattccttcagctaacccctttatttcatgtgtccaagtctggtttctgggtttctttgtagtccctccgggcctgttcgtgcgccttcacttgcaaaaggttcgtcgtggagggccgtgtgcttgtttgcagcagtaacgatgcccttcccgagcgtgctggagtggctcctcgctgacgcaagctcaccttgcagcctcctcagcaactgcaacttaaacgcgccctcaggaagccctggaatctcgctcagaattttttttctttttttgagacagtctcgctgcgacgcccaggctatagcgcaatggcgcgatctcggctccctgcaacctccctcaggaagccgtggaagctcgaccgccagaaacttccttctcctgactcaggccacagtcttctgtgtggctggtctccaggaggtaaggcccgccctgcaggcaacaccggtgcttgggctcctgctgagcagttctttcctgcgagtaacagaaccagggagggaggtgggctgtggcctcccctgcccctacagtcgtctcctgcagctcccaccatgctggactcatcagcagcagagcaagtgacccgactgacgctgaagctcttgggacagaagctggagcaagaacggcagaacgtggaagggggacctgagggcctccacctcgagccaggaaatgaggaccggccggacgatgccctgcagactgctctgaagagaaggagggaccttctgcagagactccgggaacaacacctcctggacgagctctctcgggcccaggcctggagcgggccaagcagaggagccctcgggtcagccctgcccccagagctgccccccacgggcatcctacccactgcctccccatccccgctggccccagacccgccaaggatcatcctgcctacggtcccccagcctcctgccaccatcattcagcagctccctcagcagccactcatagcacagattcctcctccccaggccttccctactcaacggtcaggaagtattaaggaagacatggtggagctgctgctgctgcagaacgcacaggtgcaccagttggtcctgcagaactggatgctcaaggccctgcccccagccctgcaggacccgccacatgtgcccccgagggtcccacgagctgccaggccaaggctgcctgccgtgcaccaccaccaccaccaccaccatgctgtgtggccacctggggctgccactgtcctccagcccgcccccagcctgtggacgcctggcccaccctgagtgtgagtcacagagaccctggccggggcaccctccacccccaggcttcctcagggctgtgggctgtggcgggactatggaagggagcagggagagaccctgccaccacccggagtggctacgcgagtgtggactgcaggctcctcctggggaagctgggcaggctcgctttctggtcacggggccattccagggggcatcccttgctccgggtcccctgcagtgaggggcctgtgaaccccaccagggcaacagcccctcccagggacccctcctttcctgtagggcggcgccggcccacctgggagcctcagatccccctcttccatcacggaggtaaagttgaggccgtggacgccaccagcctgatgaaataaagatttcatccagaaagagtttaagaaaatctcagctcaggagccagaacagaaaagatcaatagctttagccacatggaagtgtgaacatcctgatggggaaaataccacaaagtctaatttaataactagggacacctgtgtgccacagctgtggcacagactcccactaaagaagtaggggtgcatggctcatgcctgtaatcccagcactttaagaggctgaggcaggaggatcacttgagctcaggaattcgagaccagcctgggtcacatagcaagaccccgtctctacaaaaaataaatttaaaaaactagccaggtgtggtgatatgcgcctgttatctcagcagctctgggggctgaggtgggaggattgcttgagcccaggagttagaagctgcagtgagctctgatggaaccactgcactatagcctggaccacagagcaggcccctgtctcaaaaaataaaataaaaaagtgaaagaagcaaaaaaaaaaaaaaa

SEQ ID NO: 127 - DNA, 1796 bp, Homo sapiens
ggagtggagcggggcggggcgcagcggggcggggcgggcctggagctgcacctgcttctgggcggacgcacttggcgcgcggcgcgggctgcagacggctgcgaggcgctgggcacaggtgtcctgatggcaaatttcaagggccacgcgcttccagggagtttcttcctgatcattgggctgtgttggtcagtgaagtacccgctgaagtactttagccacacgcggaagaacagcccactacattactatcagcgtctcgagatcgtcgaagccgcaattaggactttgttttccgtcactgggatcctggcagagcagtttgttccggatgggccccacctgcacctctaccatgagaaccactggataaagttaatgaattggcagcacagcaccatgtacctattctttgcagtctcaggaattgttgacatgctcacctatctggtcagccacgttcccttgggggtggacagactggttatggctgtggcagtattcatggaaggtttcctcttctactaccacgtccacaaccggcctccgctggaccagcacatccactcactcctgctgtatgctctgttcggagggtgtgttagtatctccctagaggtgatcttccgggaccacattgtgctggaacttttccgaaccagtctcatcattcttcagggaacctggttctggcagattgggtttgtgctgttcccaccttttggaacacccgaatgggaccagaaggatgatgccaacctcatgttcatcaccatgtgcttctgctggcactacctggctgccctcagcattgtggccgtcaactattctcttgtttactgccttttgactcggatgaagagacacggaaggggagaaatcattggaattcagaagctgaattcagatgacacttaccagaccgccctcttgagtggctcagatgaggaatgagccgagatgcggagggcgcagatgtcccactgcacagctggaatgaatggagttcatcccctccacctgaatgcctgctgtggtctgatcttaagggtctatatatttgcacctcctcattcaacacagggctggaggttctacaacaggaaatcaggcctacagcatcctgtgtatcttgcagttgggatttttaaacatactataaagtctgtgttggtatagtacccttcataaggaaaaatgaagtaatgcctataagtagcaggcctttgtgcctcagtgtcaagagaaatcaagagatgctaaaagctttacaatggaagtggcctcatggatgaatccggggtatgagcccaggagaacgtgctgcttttggtaacttatccctttttctcttaagaaagcaggtactttcttattagaaatatgttagaatgtgtaagcaaacgacagtgcctttagaattacaattctaacttacatattttttgaaagtaaaataattcacaagctttggtattttaaaattattgttaaacatatcataactaatcataccagggtactgcaataccactgtttataagtgacaaaattaggccaaaggtgatttttttttaaatcaggaagctggttactggctctactgagagttggagccctgatgttctgattcttcaaagtcaccctaaaagaagatctgacaggaaagctgtataatgagatagaaaaacgtcaggtatggaaggctttcagttttaatatggctgaaagcaaaggataacgaattcagaattagtaatgtaaaatcttgataccctaaaaaaaaaaaaaaaaaa

SEQ ID NO: 128 - DNA, 841 bp, Homo sapiens
agtgtcccggccgcgcaggacttgacatgctgcccgactgcctgtcggccgagggcgagctgcgctgccgccggctgctggcaggggccacggcccggctccgcgcgcggcccgcgtcggccgcggtgctcgtgccgctctgctcagtgcgtggggtcccggcgctgctgtacacgctgcggtccagccgcctgaccgggaggcacaagggcgacgtcagtttcccaggcggcaagtgcgacccggctgaccaagatgtggtgcacacggccctgcgggaaacccgggaggagctgggcctggcagtgcccgaggagcacgtgtggggcctgctgcggcctgtgtatgatccgcaaaaggccaccgtggtgccagtgcttgctggtgtaggcccactggatccccagagcctcaggcccaactcggaggaggtgagctgggggatatgagggggttgggctgttccagtcctctgtctaccctctctgcctcctgcctgcaggtagatgaggtgtttgcactgccgctggcccacctgctgcagacgcagaatcagggctatacccacttctgccggggtggccacttccgctacacactacccgtcttcctgcatggaccacaccgggtctggggcctcacagctgtcatcactgagtttgccctgcagctgctggcacctggtacctaccagccccgcctggccggcctgacctgctcaggggctgagggtctggcccgccctaagcagcccctggcttcaccctgtcaggccagctccactccaggactgaataaaggtctttgacagctctaaaaaaaaaaaaaaaaaaaaaaaaaa

SEQ ID NO: 129 - DNA, 2147 bp, Homo sapiens
gatttgtaagtttacctgttgcagccaatagcagggccatctcagccagccagcactggatactatctggccagaagtagcaaagcagctcttatttgaaaaaccactgggttccgagttcattactacaggaaaaactgttctcttctgtggcacagagaaccctgcttcaaagcagaagtagcagttccggagtccagctggctaaaactcatcccagaggataatggcaacccatgccttagaaatcgctgggctgtttcttggtggtgttggaatggtgggcacagtggctgtcactgtcatgcctcagtggagagtgtcggccttcattgaaaacaacatcgtggtttttgaaaacttctgggaaggactgtggatgaattgcgtgaggcaggctaacatcaggatgcagtgcaaaatctatgattccctgctggctctttctccggacctacaggcagccagaggactgatgtgtgctgcttccgtgatgtccttcttggctttcatgatggccatccttggcatgaaatgcaccaggtgcacgggggacaatgagaaggtgaaggctcacattctgctgacggctggaatcatcttcatcatcacgggcatggtggtgctcatccctgtgagctgggttgccaatgccatcatcagagatttctataactcaatagtgaatgttgcccaaaaacgtgagcttggagaagctctctacttaggatggaccacggcactggtgctgattgttggaggagctctgttctgctgcgttttttgttgcaacgaaaagagcagtagctacagatactcgataccttcccatcgcacaacccaaaaaagttatcacaccggaaagaagtcaccgagcgtctactccagaagtcagtatgtgtagttgtgtatgtttttttaactttactataaagccatgcaaatgacaaaaatctatattactttctcaaaatggaccccaaagaaactttgatttactgttcttaactgcctaatcttaattacaggaactgtgcatcagctatttatgattctataagctatttcagcagaatgagatattaaacccaatgctttgattgttctagaaagtatagtaatttgttttctaaggtggttcaagcatctactctttttatcatttacttcaaaatgacattgctaaagactgcattattttactactgtaatttctccacgacatagcattatgtacatagatgagtgtaacatttatatctcacatagagacatgcttatatggttttatttaaaatgaaatgccagtccattacactgaataaatagaactcaactattgcttttcagggaaatcatggatagggttgaagaaggttactattaattgtttaaaaacagcttagggattaatgtcctccatttataatgaagattaaaatgaaggctttaatcagcattgtaaaggaaattgaatggctttctgatatgctgttttttagcctaggagttagaaatcctaacttctttatcctcttctcccagaggctttttttttcttgtgtattaaattaacatttttaaaaagcagatattttgtcaaggggctttgcattcaaactgcttttccagggctatactcagaagaaagataaaagtgtgatctaagaaaaagtgatggttttaggaaagtgaaaatatttttgtttttgtatttgaagaagaatgatgcattttgacaagaaatcatatatgtatggatatattttaataagtatttgagtacagactttgaggtttcatcaatataaataaaagagcagaaaaatatgtcttggttttcatttgcttaccaaaaaaacaacaacaaaaaaagttgtcctttgagaacttcacctgctcctatgtgggtacctgagtcaaaattgtcatttttgttctgtgaaaaataaatttccttcttgtaccatttctgtttagttttactaaaatctgtaaatactgtatttttctgtttattccaaatttgatgaaactgacaatccaatttgaaagtttgtgtcgacgtctgtctagcttaaatgaatgtgttctatttgctttatacatttatattaataaattgtacatttttctaattatttgaa

SEQ ID NO: 130 - DNA, 1625 bp, Homo sapiens
agcgagtgcgcgctcctcctcgcccgccgctaggtccatcccggcccagccaccatgtccatccacttcagctccccggtattcacctcgcgctcagccgccttctcgggccgcggcgcccaggtgcgcctgagctccgctcgccccggcggccttggcagcagcagcctctacggcctcggcgcctcacggccgcgcgtggccgtgcgctctgcctatgggggcccggtgggcgccggcatccgcgaggtcaccattaaccagagcctgctggccccgctgcggctggacgccgacccctccctccagcgggtgcgccaggaggagagcgagcagatcaagaccctcaacaacaagtttgcctccttcatcgacaaggtgcggtttctggagcagcagaacaagctgctggagaccaagtggacgctgctgcaggagcagaagtcggccaagagcagccgcctcccagacatctttgaggcccagattgctggccttcggggtcagcttgaggcactgcaggtggatgggggccgcctggaggcggagctgcggagcatgcaggatgtggtggaggacttcaagaataagtacgaagatgaaattaaccaccgcacagctgctgagaatgagtttgtggtgctgaagaaggatgtggatgctgcctacatgagcaaggtggagctggaggccaaggtggatgccctgaatgatgagatcaacttcctcaggaccctcaatgagacggagttgacagagctgcagtcccagatctccgacacatctgtggtgctgtccatggacaacagtcgctccctggacctggacggcatcatcgctgaggtcaaggcgcagtatgaggagatggccaaatgcagccgggctgaggctgaagcctggtaccagaccaagtttgagaccctccaggcccaggctgggaagcatggggacgacctccggaatacccggaatgagatttcagagatgaaccgggccatccagaggctgcaggctgagatcgacaacatcaagaaccagcgtgccaagttggaggccgccattgccgaggctgaggagcgtggggagctggcgctcaaggatgctcgtgccaagcaggaggagctggaagccgccctgcagcggggcaagcaggatatggcacggcagctgcgtgagtaccaggaactcatgagcgtgaagctggccctggacatcgagatcgccacctaccgcaagctgctggagggcgaggagagccggttggctggagatggagtgggagccgtgaatatctctgtgatgaattccactggtggcagtagcagtggcggtggcattgggctgaccctcgggggaaccatgggcagcaatgccctgagcttctccagcagtgcgggtcctgggctcctgaaggcttattccatccggaccgcatccgccagtcgcaggagtgcccgcgactgagccgcctcccaccactccactcctccagccaccacccacaatcacaagaagattcccacccctgcctcccatgcctggtcccaagacagtgagacagtctggaaagtgatgtcagaatagcttccaataaagcagcctcattctgaggcctgagtgatcca

SEQ ID NO: 131 - DNA, 3607 bp, Homo sapiens
attgtccgtccctccgggctttgtagaatcgtcgccggcttacctggccgtgggcgcgtcctggccgctgcagcccggagcagggtgccagccgccgccgccgccgccatggtgtccccggtcactgtggtgaagagtgaaggacccaaactggtgccgttcttcaaggccacctgcgtgtattttgtgctctggctgccctcatctagcccatcgtgggtcagcaccctcatcaagtgcctgcctatcttctgcctctggctcttccttctggcccatggcctgggattcctgctggcccaccccagcgccacccgcatctttgtggggcttgtcttctctgctgtaggtgacgccttcctcatctggcaggaccaaggatacttcgtgcatggtctgctgatgtttgctgtgacccacatgttctacgcctcggcctttggcatgcagccactggctcttcggacaggtctggtgatggcagcgctgtcgggcctgtgctatgccctcctctacccatgcctctcaggtgccttcacctacctggtgggggtctatgtggcccttatcggcttcatgggctggcgagctatggcagggctgcggctggccggggcagactggcgctggacagagctggcagctggcagtggtgcactcttctttatcatctcagacctgaccatcgccctcaacaaattctgttttcctgtgccctactctcgggcgcttatcatgtccacctactatgtggcccagatgctcgtcgccttgtcagctgtcgaaagccgggagcctgtggaacactacagactgaccaaggccaactgaggtgccagggtctggtcacccctctctcctcctggggctggggcccagatcctggggacctgcaggagctggatcaggatggctgcagtgccagcctggggcagcaggtactgcctgaggaatttgcaagttcgtgtggggaggctggaaaaggatctccctagcagaactcgtggttcaggacaatgctgagagctaaaagagccagcctaatatcagactggagccagaagtagacatctccccacctctaccctatcaggactttcaaaacccccctggaaggtgatggtgctcagcttcttgacacccccccacccacttcccctaccaggtggaagagtctgactccatgtgttatgcctaggaccaatggcagtgctgggttcacccactcctcccctttttcatctgcacaaagttgagggaaacgggagaatctgtgctgagaagactcagacccaggagcccctttcacaggcccctagttgggaagactggatgagagtggagcctccgtttcttttccctcttctatccttgttacttgaacaatctcagtctctaagtggtgggtggggacatgaagaggtgtgggtccaggttaggcaggagagagaacttctttggtctcggagtttggggtctcaagaattcaagtagccccatctctctctcgggcaagcccaaagctcaggtcccatacgctacccttagatcctatccccagggctagggtgaaccatgccaaaggaaggggccagcttctctgtgtgtgtgtgtagcctgtctcctagtctgcctatgtctttctctgctatatgtttctgtcctgctgtctgtcaaaagtctcacagagagagggcctcagggagctgctgaggggtgctgagcctggctcagggagctgggacccctcccctccaacacacatactcacagtgctttcctccttgtccctcctacactaggagcaagaggagggggctccaatgacactccggggttttaagacccaaggcacattcaatgcaaggggagcaaggatgggacaactccatcttctgctgcccatgtgaaaaataataaaaatcaagagccattggctgccctgcttgtgggcctgtgtggcacatgcctatcttggagagggcatgggggcatggtgccagaggctctggctgtcctcacagcctagtcacagtcctgggcagtgcatcttggtgccaggctggctacctggctctggtgacactgtgccggttggagtgtgtctcacttccctggtgtgggtgaggatgtggtttaggaggatgggggatgagtggtatttgccactgtccaaatttgtccttgatgtactcccctgtgcacaggtgcccagcacccttggtgacctttagttacccagtgtcatctattgctgcccacctcctcccctccccacttgagacctgctgcttccttcaaaatgatccagattcccttcaagcatctccctcatcctggactctgggcttagttgaacagctgggagcaatgggattagattggctgattcattcattagttgtaaagccctggcagaataatacatcactctgctccaggagcatttgtaacttaacagacaatgccctaacccagaagtagaaagggaagccttgggtggtggtggatatgccatcagtagaggtgttgctcatttgtggggatgtgatttaggagactcaagtctcaggggtggttggatgagtcagtgatttccaaattagtttttacagagattcctggtaagggggtagtgaaggaataatgagagaaggcaggctcaaagacctcctatccttatttcaagtccagtagcttcttaggttgtgtttttttttgttttgttttgttttggaaggattccactgaaaaacgtaagtttgaaacttagtgagctggatgatcaatcccttctagctctgaaccctggacactaaagagggaagatcttgatcctttcaaacttcagaactctgaacacagacctacctagtgtgaagaaatgggagggagcaggatggagagcaggatgaagtcagcaggacttgcccccaagctctgaggggagggggaaagtgccatgtagatgtggaggaggggaagggaagaccaggcccagtcacaagaaggctggtcactgccttgtgggtgggtttggactaggctttcaggggtccaggtctgggattccctatcatgcaatcacatccatccccttggtccctgctgtatatcaccctcaggaacgggaaaggatgagttacgtttattgccccatcccttcactgaatgtttacattaacaaacaccagagagcaaactgggcttcctacactgggccatgcagaggacaggccaagaaactccacatcataacagcctcctgatgcctgggcttggctggagctcacatgaggtgctttgatttcttctgcagactctcggtgatggatgctacaactgacttatcatctttgtctgaaagagcaaaggaagtattcgttatattaatgatgctggcgaccagggaaattccaaactgctggacttcctatgcaggaaaccaggagctggaccctgggacccttaatcttgggttggcagagtgtgaaggggcaagagctgccatttatctagcacttaatatttgccagacattgtgccaggcagttgtgtactgtctcatttaagcctcatagtcctataaagaagatgagaaaacagg

SEQ ID NO: 132 - DNA, 4334 bp, Homo sapiens
ctacggcgcccgtggctgcagcgccagcgccaaagccaagtttgcgcctcgagagtttgcgcctcgagagtttgcgccggttcgcattccccggcctcccgttcgctcccccgcgaaccaggcggccgtgcgcctctcggggcaaccacccaagagcacccgggcgggaggacgccgagcagggggtgttgcgggctgggacaggggcagccacctcccgaagatgcaggatggcagcagagccgcagccgtccagcctttcctaccgcaccacgggctccacctacctgcacccgctcagcgagctcctgggcatcccgctggaccaggtgaattttgtggtatgccagcttgttgctctgtttgctgctttctggtttcgcatctacttacgtcctggtacaaccagctctgatgtccggcatgcggttgccaccatttttggcatctattttgtcatcttttgtttcggctggtactctgtgcatctttttgtgctggtgttaatgtgctatgcaatcatggtcactgctagtgtatccaatattcacagatattccttttttgtagcaatgggatatcttacaatatgccacatcagccgaatatacatcttccactatggaattctcactacggatttttctgggcctctgatgattgtcactcagaagatcacaaccttggcattccaggttcatgatggattaggtcgaagagctgaagacctttctgctgaacaacatcgacttgctatcaaagtgaaaccctcttttttggaatacttaagttaccttctcaatttcatgagtgtcatagctggtccttgtaacaatttcaaggactacatagccttcattgaggggaagcatatacacatgaagttgctggaggtgaactggaagcgaaaaggtttccacagcttgccagaaccttctcccacaggagctgtgatacacaagttgggcatcaccttggtgtctctccttttgtttttgacgctaacgaagacctttcctgtcacctgccttgtggatgactggtttgtccataaagcaagctttccggctcgactctgctacttatatgttgtcatgcaagcctcaaagcccaagtattactttgcatggacattagctgatgcagtgaataacgcagctggctttgggttcagcggagtggataagaatgggaatttctgttgggatctgctttcgaacctaaacatctggaaaattgagactgccacaagtttcaaaatgtacttggaaaactggaatattcagacagctacttggctaaagtgtgtgtgctatcagcgggttccatggtaccccacggtgctaaccttcatcctgtctgctttgtggcatggtgtctaccctggatactattttaccttcttaactggaattcttgtcacattagcagctagagcggtcaggaacaactacagacattacttcctttcttcaagagctctcaaggctgtgtatgatgcaggcacctgggccgtcactcagctggctgtctcttacacggtagcaccctttgtgatgttggcagttgaaccgaccatcagcttatacaagtccatgtacttttatttgcacatcataagtctcctgataatactatttctgccaatgaaaccacaagctcatacgcaaaggcggcctcagactctgaactctattaataagagaaaaacagattgatacctccaagagaagcggaacaagcaaaactgcagaacgttcgaaagatgagatgacaaggcttcaagggctcctccggtggcttagaggcgatgtttacatgcatctttattttgttcttttttaaagtgcagggagtatttttttttttttttttttttttttttttttgagacggagtctcgctctgtcgcccaggctggagtgcagtggcgggatctcggctcactgcaagctccgcctcccgggttcacgccattctcctgcctcagcctcccaagtagctgggactacaggcgcccgccactacgcccggctaattttttgtatttttagtagagacggggtttcaccgttttagccgggatggtctcgatctcctgacctcgtgatccgcccgcctcggcctcccaaagtgctgggattacaggcgtgagccaccgcgcccggccgggagtatttttataaagcctttttgtacagattaatcggccatgtccaggttattggttttgatattttataggacatttgagtggtgtggcgatgtgtagagaatgtgccagagctgcagagacagtccattctgggctgctggctttttgcccttcctgcatgatttccagctactgtgacctggatgctgggaacccaggcatcggctccaaaaattagaaggcgagtgctgagaagacttgtcacaggtttctcaaatcagaatatactcagtcatagtggttccctgggaagccccagaccctttgacttgtgacattactggtttgcagacataataactacactcagaggaccatggaggcagagggatcatggtttcagggcactgaaaactctacgagccaagaggactagtgcatggactgaaagtcaggcatgccctcaaataggctgtattttctttccaggaatgtaacctttcccctttttcttctgacctgagccaagattggaaatcagaaagtctcctgtacatggagctgaagaggggctgctgttttccgaatgttttccatttcacaggcgccacctgcttgcccggggttggtcttgagaagacacccaaatgttcatgcctcagaaaggcagcagaatgccttttaggaaatttttttaaagtaatttgaagttatatagaagtttggtaagaagaagcagttgtttctctcttttctccctcatttcatggaggtgttaatgatcatggctggccgtgatgtacacatgggctgattttcattttttcagtttcatagctgagaaattcagctttgttttagttgaatcatcatattggaaagcagacattgaaagttttcttttctatctttgttatgaatgtgctatggccccttttggagacttctattgggtaatattctatgtgagagaaggaaacttggtattaaatgttgtggaaaataataatgatgataataataaagtatatgctgcaatggtgtactgccaatcagattgcttgggagaagaaaatttattcaaatccaacgataaaaaattaatttcttattgaataaacagtatgttcccatataaaagaaatgtttctgatgggaataattgctttttgtctgtgtcaatagagacacaggtccataaggtgtcctactgctgcttctcttaggatagtgaaatgtgaatgtgatgtgcctgttcctctacagcatgtaaacagtcctggtgctgggggagagtactagaacccaaactttagtccttatttgggacagtggaagttaagaagtagtagatgtgagctagtgcatgagtctcaccccactttaacaaggaaatcttggggcaaccctacttcgctgtcccaggaagaatcttagatagtgggtaggggaagggggttgtaggtatctaaaatctgtcagagtttgtctccaccaagaatagtttgaggtacgagaccaagaaaaatgtacatcttgcaaactagcaaaaatggtaaatattaccattggtgtggagtatgtggaataatcatattacagtgaagtctttgaatttacaatgtgattgatgatcaggtttcactgtatgtaatgtaagtatcctcatgtctgaaagaagaacttggtaatgagagcagaggtgtctgctttggtgaccagctgccctggtttgccaaggactctctcaagccctcagtcctgggcaagctggggccattggtcccactagtgactgcccagaattgattactccttatgggatgaggagaagtcaaacctctaggagttgagcttatggatgctatatgtcagacttggtgttaggccctgggacacaaacatgaggctttattctgtataaaaagaacaacacataggagactgattagcatcctttttcttctgaaaaccacttacccatagaaaaagatttcaactgaggaccaacatttagacggaaggttgggactgtttttattaccttagatttccaagttgtcctaaatataagatgcagttcataaatacttattggaatgtgagctttcagttgaaaataaatacactttctggttttgtttttgaaaaagccaaatctaaaaaaaaaaaaaaaaaa

SEQ ID NO: 133 - DNA, 2687 bp, Homo sapiens
atactcctaagctcctcccccggcggcgagccagggagaaaggatggccggcctggcggcgcggttggtcctgctagctggggcagcggcgctggcgagcggctcccagggcgaccgtgagccggtgtaccgcgactgcgtactgcagtgcgaagagcagaactgctctgggggcgctctgaatcacttccgctcccgccagccaatctacatgagtctagcaggctggacctgtcgggacgactgtaagtatgagtgtatgtgggtcaccgttgggctctacctccaggaaggtcacaaagtgcctcagttccatggcaagtggcccttctcccggttcctgttctttcaagagccggcatcggccgtggcctcgtttctcaatggcctggccagcctggtgatgctctgccgctaccgcaccttcgtgccagcctcctcccccatgtaccacacctgtgtggccttcgcctgggtgtccctcaatgcatggttctggtccacagttttccacaccagggacactgacctcacagagaaaatggactacttctgtgcctccactgtcatcctacactcaatctacctgtgctgcgtcaggaccgtggggctgcagcacccagctgtggtcagtgccttccgggctctcctgctgctcatgctgaccgtgcacgtctcctacctgagcctcatccgcttcgactatggctacaacctggtggccaacgtggctattggcctggtcaacgtggtgtggtggctggcctggtgcctgtggaaccagcggcggctgcctcacgtgcgcaagtgcgtggtggtggtcttgctgctgcaggggctgtccctgctcgagctgcttgacttcccaccgctcttctgggtcctggatgcccatgccatctggcacatcagcaccatccctgtccacgtcctctttttcagctttctggaagatgacagcctgtacctgctgaaggaatcagaggacaagttcaagctggactgaagaccttggagcgagtctgccccagtggggatcctgcccccgccctgctggcctcccttctcccctcaacccttgagatgattttctcttttcaacttcttgaacttggacatgaaggatgtgggcccagaatcatgtggccagcccaccccctgttggccctcaccagccttggagtctgttctagggaaggcctcccagcatctgggactcgagagtgggcagcccctctacctcctggagctgaactggggtggaactgagtgtgctcttagctctaccgggaggacagctgcctgtttcctccccatcagcctcctccccacatccccagctgcctggctgggtcctgaagccctctgtctacctgggagaccagggaccacaggccttagggatacagggggtccccttctgttaccaccccccaccctcctccaggacaccactaggtggtgctggatgcttgttctttggccagccaaggttcacggcgattctccccatgggatcttgagggaccaagctgctgggattgggaaggagtttcaccctgaccattgccctagccaggttcccaggaggcctcaccatactccctttcagggccagggctccagcaagcccagggcaaggatcctgtgctgctgtctggttgagagcctgccaccgtgtgtcgggagtgtgggccaggctgagtgcataggtgacagggccgtgagcatgggcctgggtgtgtgtgagctcaggcctaggtgcgcagtgtggagacgggtgttgtcggggaagaggtgtggcttcaaagtgtgtgtgtgcagggggtgggtgtgttagcgtgggttaggggaacgtgtgtgcgcgtgctggtgggcatgtgagatgagtgactgccggtgaatgtgtccacagttgagaggttggagcaggatgagggaatcctgtcaccatcaataatcacttgtggagcgccagctctgcccaaggcgccacctgggcggacagccaggagctctccatggccaggctgcctgtgtgcatgttccctgtctggtgcccctttgcccgcctcctgcaaacctcacagggtccccacacaacagtgccctccagaagcagcccctcggaggcagaggaaggaaaatggggatggctggggctctctccatcctccttttctccttgccttcgcatggctggccttcccctccaaaacctccattcccctgctgccagcccctttgccatagcctgattttggggaggaggaaggggcgatttgagggagaaggggagaaagcttatggctgggtctggtttcttcccttcccagagggtcttactgttccagggtggccccagggcaggcaggggccacactatgcctgcgccctggtaaaggtgacccctgccatttaccagcagccctggcatgttcctgccccacaggaatagaatggagggagctccagaaactttccatcccaaaggcagtctccgtggttgaagcagactggatttttgctctgcccctgaccccttgtccctctttgagggaggggagctatgctaggactccaacctcagggactcgggtggcctgcgctagcttcttttgatactgaaaacttttaaggtgggagggtggcaagggatgtgcttaataaatcaattccaagcctca

SEQ ID NO: 134 - DNA, 2770 bp, Homo sapiens
cttcttccgctctgaggcgctactgaggccgcggagccggactgcggttggggcgggaagagccggggccgtggctgacatggagcagccctgctgctgaggccgcgccctccccgccctgaggtgggggcccaccaggatgagcaagctgcccagggagctgacccgagacttggagcgcagcctgcctgccgtggcctccctgggctcctcactgtcccacagccagagcctctcctcgcacctccttccgccgcctgagaagcgaagggccatctctgatgtccgccgcaccttctgtctcttcgtcaccttcgacctgctcttcatctccctgctctggatcatcgaactgaataccaacacaggcatccgtaagaacttggagcaggagatcatccagtacaactttaaaacttccttcttcgacatctttgtcctggccttcttccgcttctctggactgctcctaggctatgccgtgctgcggctccggcactggtgggtgattgcggtcacgacgctggtgtccagtgcattcctcattgtcaaggtcatcctctctgagctgctcagcaaaggggcatttggctacctgctccccatcgtctcttttgtcctcgcctggttggagacctggttccttgacttcaaagtcctaccccaggaagctgaagaggagcgatggtatcttgccgcccaggttgctgttgcccgtggacccctgctgttctccggtgctctgtccgagggacagttctattcacccccagaatcctttgcagggtctgacaatgaatcagatgaagaagttgctgggaagaaaagtttctctgctcaggagcgggagtacatccgccaggggaaggaggccacggcagtggtggaccagatcttggcccaggaagagaactggaagtttgagaagaataatgaatatggggacaccgtgtacaccattgaagttccctttcacggcaagacgtttatcctgaagaccttcctgccctgtcctgcggagctcgtgtaccaggaggtgatcctgcagcccgagaggatggtgctgtggaacaagacagtgactgcctgccagatcctgcagcgagtggaagacaacaccctcatctcctatgacgtgtctgcaggggctgcgggcggcgtggtctccccaagggacttcgtgaatgtccggcgcattgagcggcgcagggaccgatacttgtcatcagggatcgccacctcacacagtgccaagcccccgacgcacaaatatgtccggggagagaatggccctgggggcttcatcgtgctcaagtcggccagtaacccccgtgtttgcacctttgtctggattcttaatacagatctcaagggccgcctgccccggtacctcatccaccagagcctcgcggccaccatgtttgaatttgcctttcacctgcgacagcgcatcagcgagctgggggcccgggcgtgactgtgccccctcccaccctgcgggccagggtcctgtcgccaccacttccagagccagaaagggtgccagttgggctcgcactgcccacatgggacctggccccaggctgtcaccctccaccgagccacgcagtgcctggagttgactgactgagcaggctgtggggtggagcactggactccggggccccactggctggaggaagtggggtctggcctgttgatgtttacatggcgccctgcctcctggaggaccagattgctctgccccaccttgccagggcagggtctgggctgggcacctgacttggctggggaggaccagggccctgggcagggcagggcagcctgtcacccgtgtgaagatgaaggggctcttcatctgcctgcgctctcgtcggtttttttaggattattgaaagagtctgggacccttgttggggagtgggtggcaggtgggggtgggctgctggccatgaatctctgcctctcccaggctgtccccctcctcccagggcctcctgggggacctttgtattaagccaattaaaaacatgaatttaaaaaaaaaaaaaaattccagcccctcccactgccttgcctcttgagggaagagaaaggcaggcagcagcttggatgaagagggaagacccctcacacagcctctcctgggctcacaggagggcggagcccggggagccagttcctgaaacatgccccccattccccccccgcccaccccccactccccgctttcctgaccagttcaactgagcagatgactggtcagaaaaaaatgccccgccccctgccaggcttcagcggggcaagtttaaagtctctagtccaggaatggaggtgggggtatgggcacctggcagtgcccacagcaagccttgactgtgtggcctggagatggggcctgagcttcagggtcactgaggcacctctgggatccaggccacctggagccccggacctcccagactccactcacccattccctctccccgcacggcactcacaccaggggcggcctggagcccggatcgcagggcggggccaggccactgcctgccttcctcctccctcccggctggcctgcccccttgcctgcctgcatgcaggcttccagcagagccagcttcttcagagccaggtggatcctgtttcggtcctgcctaggtgtgtgaccctgggcgaatctacctctctcagcttctgcttcccactttatgaaaatgggactgatgtcacagggttgttatgagattaaaagatatgaagaaccggg

SEQ ID NO: 135 - DNA, 4664 bp, Homo sapiens
gcttgctcccaatcacaggagaaggaggaggtggaggaggagggctgcttgaggaagtataagaatgaagttgtgaagctgagattcccctccattgggaccggagaaaccaggggagccccccgggcagccgcgcgccccttcccacggggccctttactgcgccgcgcgcccggcccccacccctcgcagcaccccgcgccccgcgccctcccagccgggtccagccggagccatggggccggagccgcagtgagcaccatggagctggcggccttgtgccgctgggggctcctcctcgccctcttgccccccggagccgcgagcacccaagtgtgcaccggcacagacatgaagctgcggctccctgccagtcccgagacccacctggacatgctccgccacctctaccagggctgccaggtggtgcagggaaacctggaactcacctacctgcccaccaatgccagcctgtccttcctgcaggatatccaggaggtgcagggctacgtgctcatcgctcacaaccaagtgaggcaggtcccactgcagaggctgcggattgtgcgaggcacccagctctttgaggacaactatgccctggccgtgctagacaatggagacccgctgaacaataccacccctgtcacaggggcctccccaggaggcctgcgggagctgcagcttcgaagcctcacagagatcttgaaaggaggggtcttgatccagcggaacccccagctctgctaccaggacacgattttgtggaaggacatcttccacaagaacaaccagctggctctcacactgatagacaccaaccgctctcgggcctgccacccctgttctccgatgtgtaagggctcccgctgctggggagagagttctgaggattgtcagagcctgacgcgcactgtctgtgccggtggctgtgcccgctgcaaggggccactgcccactgactgctgccatgagcagtgtgctgccggctgcacgggccccaagcactctgactgcctggcctgcctccacttcaaccacagtggcatctgtgagctgcactgcccagccctggtcacctacaacacagacacgtttgagtccatgcccaatcccgagggccggtatacattcggcgccagctgtgtgactgcctgtccctacaactacctttctacggacgtgggatcctgcaccctcgtctgccccctgcacaaccaagaggtgacagcagaggatggaacacagcggtgtgagaagtgcagcaagccctgtgcccgagtgtgctatggtctgggcatggagcacttgcgagaggtgagggcagttaccagtgccaatatccaggagtttgctggctgcaagaagatctttgggagcctggcatttctgccggagagctttgatggggacccagcctccaacactgccccgctccagccagagcagctccaagtgtttgagactctggaagagatcacaggttacctatacatctcagcatggccggacagcctgcctgacctcagcgtcttccagaacctgcaagtaatccggggacgaattctgcacaatggcgcctactcgctgaccctgcaagggctgggcatcagctggctggggctgcgctcactgagggaactgggcagtggactggccctcatccaccataacacccacctctgcttcgtgcacacggtgccctgggaccagctctttcggaacccgcaccaagctctgctccacactgccaaccggccagaggacgagtgtgtgggcgagggcctggcctgccaccagctgtgcgcccgagggcactgctggggtccagggcccacccagtgtgtcaactgcagccagttccttcggggccaggagtgcgtggaggaatgccgagtactgcaggggctccccagggagtatgtgaatgccaggcactgtttgccgtgccaccctgagtgtcagccccagaatggctcagtgacctgttttggaccggaggctgaccagtgtgtggcctgtgcccactataaggaccctcccttctgcgtggcccgctgccccagcggtgtgaaacctgacctctcctacatgcccatctggaagtttccagatgaggagggcgcatgccagccttgccccatcaactgcacccactcctgtgtggacctggatgacaagggctgccccgccgagcagagagccagccctctgacgtccatcatctctgcggtggttggcattctgctggtcgtggtcttgggggtggtctttgggatcctcatcaagcgacggcagcagaagatccggaagtacacgatgcggagactgctgcaggaaacggagctggtggagccgctgacacctagcggagcgatgcccaaccaggcgcagatgcggatcctgaaagagacggagctgaggaaggtgaaggtgcttggatctggcgcttttggcacagtctacaagggcatctggatccctgatggggagaatgtgaaaattccagtggccatcaaagtgttgagggaaaacacatcccccaaagccaacaaagaaatcttagacgaagcatacgtgatggctggtgtgggctccccatatgtctcccgccttctgggcatctgcctgacatccacggtgcagctggtgacacagcttatgccctatggctgcctcttagaccatgtccgggaaaaccgcggacgcctgggctcccaggacctgctgaactggtgtatgcagattgccaaggggatgagctacctggaggatgtgcggctcgtacacagggacttggccgctcggaacgtgctggtcaagagtcccaaccatgtcaaaattacagacttcgggctggctcggctgctggacattgacgagacagagtaccatgcagatgggggcaaggtgcccatcaagtggatggcgctggagtccattctccgccggcggttcacccaccagagtgatgtgtggagttatggtgtgactgtgtgggagctgatgacttttggggccaaaccttacgatgggatcccagcccgggagatccctgacctgctggaaaagggggagcggctgccccagccccccatctgcaccattgatgtctacatgatcatggtcaaatgttggatgattgactctgaatgtcggccaagattccgggagttggtgtctgaattctcccgcatggccagggacccccagcgctttgtggtcatccagaatgaggacttgggcccagccagtcccttggacagcaccttctaccgctcactgctggaggacgatgacatgggggacctggtggatgctgaggagtatctggtaccccagcagggcttcttctgtccagaccctgccccgggcgctgggggcatggtccaccacaggcaccgcagctcatctaccaggagtggcggtggggacctgacactagggctggagccctctgaagaggaggcccccaggtctccactggcaccctccgaaggggctggctccgatgtatttgatggtgacctgggaatgggggcagccaaggggctgcaaagcctccccacacatgaccccagccctctacagcggtacagtgaggaccccacagtacccctgccctctgagactgatggctacgttgcccccctgacctgcagcccccagcctgaatatgtgaaccagccagatgttcggccccagcccccttcgccccgagagggccctctgcctgctgcccgacctgctggtgccactctggaaaggcccaagactctctccccagggaagaatggggtcgtcaaagacgtttttgcctttgggggtgccgtggagaaccccgagtacttgacaccccagggaggagctgcccctcagccccaccctcctcctgccttcagcccagccttcgacaacctctattactgggaccaggacccaccagagcggggggctccacccagcaccttcaaagggacacctacggcagagaacccagagtacctgggtctggacgtgccagtgtgaaccagaaggccaagtccgcagaagccctgatgtgtcctcagggagcagggaaggcctgacttctgctggcatcaagaggtgggagggccctccgaccacttccaggggaacctgccatgccaggaacctgtcctaaggaaccttccttcctgcttgagttcccagatggctggaaggggtccagcctcgttggaagaggaacagcactggggagtctttgtggattctgaggccctgcccaatgagactctagggtccagtggatgccacagcccagcttggccctttccttccagatcctgggtactgaaagccttagggaagctggcctgagaggggaagcggccctaagggagtgtctaagaacaaaagcgacccattcagagactgtccctgaaacctagtactgccccccatgaggaaggaacagcaatggtgtcagtatccaggctttgtacagagtgcttttctgtttagtttttactttttttgttttgtttttttaaagatgaaataaagacccagggggagaatgggtgttgtatggggaggcaagtgtggggggtccttctccacacccactttgtccatttgcaaatatattttggaaaacagctaaaaaaaaaaaaaaaaaa

SEQ ID NO: 136 - DNA, 1397 bp, Homo sapiens
acacccggaagcaggggcccgagcggagccggccgcgatgagcggggagccggggcagacgtccgtagcgccccctcccgaggaggtcgagccgggcagtggggtccgcatcgtggtggagtactgtgaaccctgcggcttcgaggcgacctacctggagctggccagtgctgtgaaggagcagtatccgggcatcgagatcgagtcgcgcctcgggggcacaggtgcctttgagatagagataaatggacagctggtgttctccaagctggagaatgggggctttccctatgagaaagatctcattgaggccatccgaagagccagtaatggagaaaccctagaaaagatcaccaacagccgtcctccctgcgtcatcctgtgactgcacaggactctgggttcctgctctgttctggggtccaaaccttggtctccctttggtcctgctgggagctccccctgcctctttcccctacttagctccttagcaaagagaccctggcctccactttgccctttgggtacaaagaaggaatagaagattccgtggccttgggggcaggagagagacactctccatgaacacttctccagccacctcatacccccttcccagggtaagtgcccacgaaagcccagtccactcttcgcctcggtaatacctgtctgatgccacagattttatttattctcccctaacccagggcaatgtcagctattggcagtaaagtggcgctacaaacactaatgctaactagtgtgtgtttttatacgtccagtctgggaatgtggggggcacagaagtccggtcagcccagcctttgcaccgccagggtggctgtgctggctgggtgggctttctggacagctactccttaggtcagtgagctcctctggcatagccaaggcaaggaaaatgagtcccacagtagaccctgcctcgtctttcccccaccctacccaccactctcctcactcacaaggaggaaataaccccattctggtgagtggccttaggaattagttcgttctaaataagaatgatctggtcgtcaaagggctctcagatctgaatccagcttcccgatctcccccaaccctgaagctggagaactggatgtctggctcctcatccaagctttctgaagattcccagccactccctccaggaaaagaggaattgagtgtaaggtgagcaggaagggatggcacagagccacccccagacataggccggtgcctagctgttttccaaaatatatttgcaaatggacaaagtgggtgtggagaaggaccccccacacttgcctccccatacaacacccattctccccctgggtctttatttcatctttaaaaaaacaaaacaaaaaaagtaaaaactaaacagaaaa

SEQ ID NO: 137 - DNA, 2233 bp, Homo sapiens
agtttccttgggcctggaatctggacacacagggctcccccccgcctctgacttctctgtccgaagtcgggacaccctcctaccacctgtagagaagcgggagtggatctgaaataaaatccaggaatctgggggttcctagacggagccagacttcggaacgggtgtcctgctactcctgctggggctcctccaggacaagggcacacaactggttccgttaagcccctctctcgctcagacgccatggagctggatctgtctccacctcatcttagcagctctccggaagacctttgcccagcccctgggacccctcctgggactccccggccccctgatacccctctgcctgaggaggtaaagaggtcccagcctctcctcatcccaaccaccggcaggaaacttcgagaggaggagaggcgtgccacctccctcccctctatccccaaccccttccctgagctctgcagtcctccctcacagagcccaattctcgggggcccctccagtgcaagggggctgctcccccgcgatgccagccgcccccatgtagtaaaggtgtacagtgaggatggggcctgcaggtctgtggaggtggcagcaggtgccacagctcgccacgtgtgtgaaatgctggtgcagcgagctcacgccttgagcgacgagacctgggggctggtggagtgccacccccacctagcactggagcggggtttggaggaccacgagtccgtggtggaagtgcaggctgcctggcccgtgggcggagatagccgcttcgtcttccggaaaaacttcgccaagtacgaactgttcaagagctccccacactccctgttcccagaaaaaatggtctccagctgtctcgatgcacacactggtatatcccatgaagacctcatccagaacttcctgaatgctggcagctttcctgagatccagggctttctgcagctgcggggttcaggacggaagctttggaaacgctttttctgcttcttgcgccgatctggcctctattactccaccaagggcacctctaaggatccgaggcacctgcagtacgtggcagatgtgaacgagtccaacgtgtacgtggtgacgcagggccgcaagctctacgggatgcccactgacttcggtttctgtgtcaagcccaacaagcttcgaaatggccacaaggggcttcggatcttctgcagtgaagatgagcagagccgcacctgctggctggctgccttccgcctcttcaagtacggggtgcagctgtacaagaattaccagcaggcacagtctcgccatctgcatccatcttgtttgggctccccacccttgagaagtgcctcagataataccctggtggccatggacttctctggccatgctgggcgtgtcattgagaacccccgggaggctctgagtgtggccctggaggaggcccaggcctggaggaagaagacaaaccaccgcctcagcctgcccatgccagcctccggcacgagcctcagtgcagccatccaccgcacccaactctggttccacgggcgcatttcccgtgaggagagccagcggcttattggacagcagggcttggtagacggcctgttcctggtccgggagagtcagcggaacccccagggctttgtcctctctttgtgccacctgcagaaagtgaagcattatctcatcctgccgagcgaggaggagggccgcctgtacttcagcatggatgatggccagacccgcttcactgacctgctgcagctcgtggagttccaccagctgaaccgcggcatcctgccgtgcttgctgcgccattgctgcacgcgggtggccctctgaccaggccgtggactggctcatgcctcagcccgccttcaggctgcccgccgcccctccacccatccagtggactctggggcgcggccacaggggacgggatgaggagcgggagggttccgccactccagttttctcctctgcttctttgcctccctcagatagaaaacagcccccactccagtccactcctgacccctctcctcaagggaaggccttgggtggccccctctccttctcctagctctggaggtgctgctctagggcagggaattatgggagaagtgggggcagcccaggcggtttcacgccccacactttgtacagaccgagaggccagttgatctgctctgttttatactagtgacaataaagattattttttgataca

SEQ ID NO: 138 - DNA, 1646 bp, Homo sapiens
gtggaatgtcatcagttaaggctattttcatttcttttgtggatcttcagttgcttcaggccatctggatgtatacatgcaggtcacagggaatatgatggcttagcttgggttcagaggcctgacacctcaggctgccaaatgtggaagatttaaatacttgaaccaataccctcctcccaaaaactgaaattggcttctgtttctgagttggtccaggcgcaatgttcagcgtatttgaggaaatcacaagaattgtagttaaggagatggatgctggaggggatatgattgccgttagaagccttgttgatgctgatagattccgctgcttccatctggtgggggagaagagaactttctttggatgccggcactacacaacaggcctcaccctgatggacattctggacacagatggggacaagtggttagatgaactggattctgggctccaaggtcaaaaggctgagtttcaaattctggataatgtagactcaacgggagagttgatagtgagattacccaaagaaataacaatttcaggcagtttccagggcttccaccatcagaaaatcaagatatcggagaaccggatatcccagcagtatctggctacccttgaaaacaggaagctgaagagggaactacccttttcattccgatcaattaatacgagagaaaacctgtatctggtgacagaaactctggagacggtaaaggaggaaaccctgaaaagcgaccggcaatataaattttggagccagatctctcagggccatctcagctataaacacaagggccaaagggaagtgaccatccccccaaatcgggtcctgagctatcgagtaaagcagcttgtcttccccaacaaggagacgatgagaaagtctttgggttcggaggattccagaaacatgaaggagaagttggaggacatggagagtgtcctcaaggacctgacagaggagaagagaaaagatgtgctaaactccctcgctaagtgcctcggcaaggaggatattcggcaggatctagagcaaagagtatctgaggtcctgatttccggggagctacacatggaggacccagacaagcctctcctaagcagcctttttaatgctgctggggtcttggtagaagcgcgtgcaaaagccattctggacttcctggatgccctgctagagctgtctgaagagcagcagtttgtggctgaggccctggagaaggggacccttcctctgttgaaggaccaggtgaaatctgtcatggagcagaactgggatgagctggccagcagtcctcctgacatggactatgaccctgaggcacgaattctctgtgcgctgtatgttgttgtctctatcctgctggagctggctgaggggcctacctctgtctcttcctaactacaaaagccctttctccccacaagcctctgggttttccctttaccagtctgtcctcactgccatcgccactaccatcctgtcaccagtgggacctctttaaaacaagcagccaaccattctttgatgtatcccattcgctccatgttaacatccaaaaccagcctggatttcatacatggacttctgattaaaagtggcaggttgtgcatgttaaaaaaaaaaaaaaaaaaaaaa

SEQ ID NO: 139 - DNA, 2109 bp, Homo sapiens
gattcggccggagctgccagcggggaggctgcagccgcgggttgttacagctgctggagcagcagcggcccccgctcccgggaaccgttcccgggccgttgatcttcggccccacacgaacagcagagaggggcagcaggatgaatgtgggcacagcgcacagcgaggtgaaccccaacacgcgggtgatgaacagccgtggcatctggctctcctacgtgctggccatcggtctcctccacatcgtgctgctgagcatcccgtttgtgagtgtccctgtcgtctggaccctcaccaacctcattcacaacatgggcatgtatatcttcctgcacacggtgaaggggacaccctttgagaccccggaccagggcaaggcgaggctgctaacccactgggagcagatggattatggggtccagttcacggcctctcggaagttcttgaccatcacacccatcgtgctgtacttcctcaccagcttctacactaagtacgaccagatccattttgtgctcaacaccgtgtccctgatgagcgtgcttatccccaagctgccccagctccacggagtccggatttttggaatcaataagtactgagagtgcagccccttcccctgcccagggtggcaggggaggggtagggtaaaaggcatgtgctgcaacactgaagacagaaagaagaagcctctggacactgccagagatgggggttgagcctctggcctaatttcccccctcgcttcccccagtagccaacttggagtagcttgtagtggggttggggtaggccccctgggctctgaccttttctgaattttttgatcttttccttttgctttttgaatagagactccatggagttggtcatggaatgggctgggctcctgggctgaacatggaccacgcagttgcgacaggaggccaggggaaaaacccctgctcacttgtttgccctcaggcagccaaagcactttaacccctgcatagggagcagagggcggtacggcttctggattgtttcactgtgattcctaggttttttcgatgccacgcagtgtgtgcttttgtgtatggaagcaagtgtgggatgggtctttgcctttctgggtagggagctgtctaatccaagtcccaggcttttggcagcttctctgcaacccaccgtgggtcctggttgggagtggggagggtcaggttggggaaagatggggtagagtgtagatggcttggttccagaggtgagggggccagggctgctgccatcctggcctggtggaggttggggagctgtaggagagctagtgagtcgagacttagaagaatggggccacatagcagcagaggactggtgtaagggagggaggggtagggacagaagctagacccaatctcctttgggatgtgggcagggagggaagcaggcttggagggttaatttacccacagaatgtgatagtaataggggagggaggctgctgtgggtttaactcctgggttggctgttgggtagacaggtggggaaaaggcccgtgagtcattgtaagcacaggtccaacttggccctgactcctgcgggggtatggggaagctgtgacagaaacgatgggtgctgtggtcctctgcaggccctcaccccttaacttcctcatacagactggcactgggcagggcctctcatgtggcagccacatgtggcgttgtgaggccaccccatgtggggtctgtggtgagagtcctgtaggatccctgctcaagcagcacagaggaaggggcaagacgtggcctgtaggcactgtctcagcctgcagagaagaaagtgaggccgggagcctgagcctgggctggagccttctcccctccccagttggactaggggcagtgttaattttgaaaaggtgtgggtccctgtgtcctcttccaggggtccaagggaacgggagaggtcactgggcctgttttctccctcctgaccctgcatctcccaccccgtgtatcatagggaactttcaccttaaaatctttctaagcaaagtgtgaataggatttttactccctttgtacagtattctgagaaacgcaaataaaagggcaacatgtttctgtt

SEQ ID NO: 140 - DNA, 3480 bp, Homo sapiens
gacaagtgccaaaatggcgatgcctaccacctagaactggattgtgcgctggccgccaccgctgccacctgctcagagtgaaataatgaaggtggtcaacctgaagcaagccattttgcaagcctggaaggagcgctggagtgactaccaatgggcaatcaacatgaagaaattctttcctaaaggagccacctgggatattctcaacctggcagatgcgttactagagcaggccatgattggaccatcccccaatcctctcatcttgtcctacctgaagtatgccattagttcccagatggtgtcctactcttctgtcctcacagccatcagtaagtttgatgacttttctcgggacctgtgtgtccaggcattgctggacatcatggacatgttttgtgaccgtctgagctgtcacggcaaagcagaggaatgcatcggactgtgccgagcccttcttagcgccctccactggctgctgcgctgcacggcagcctctgcagagcggctgcgggaggggctggaggccggcactccagccgctggggagaagcagcttgccatgtgccttcagcgcctggagaaaaccctcagcagcaccaagaaccgggccctgctgcacatcgccaaactagaggaggcctcttcttggactgccatcgagcattctctcttgaaacttggagagatcctggccaatctcagcaacccgcagctccggagtcaggccgagcagtgtggcaccctcattaggagcatccccacgatgctgtctgtgcatgcggagcagatgcacaagaccggcttccccactgtccacgccgtgatcctgctcgagggcaccatgaacctgacaggcgagacgcagtccctggtggagcagctgacgatggtgaagcgcatgcagcatatccccaccccactttttgtcctggagatctggaaagcttgcttcgtggggctcattgagtctcccgagggtacggaggagctcaagtggacagctttcactttcctcaagattccacaggttttggtgaagttgaagaagtactctcatggagacaaggacttcactgaggatgtcaactgtgcttttgagttcctgctgaagctcacccccttgttggacaaagctgaccagcgctgcaactgtgactgtacaaacttcctgctccaagaatgtggcaagcaggggcttctgtctgaggccagcgtcaacaaccttatggctaagcgcaaagcggaccgagagcacgcaccccagcagaaatcgggagagaatgccaacatccagcccaacatccagctgatcctccgggcggagcccactgtcacaaacatcctcaagacgatggatgcagaccactctaagtcaccggagggactgctgggagtcctgggccacatgctgtccgggaagagtctggacttgctgctggctgccgccgccgccactggaaagctgaaatccttcgcccggaaattcatcaatttgaatgaattcacaacctatggcagcgaagaaagcaccaaaccggcctccgtccgggccctgctgtttgacatctccttcctcatgctgtgccatgtggcccagacctatggttcagaggtgattctgtccgagtcgcgcacaggagctgaggtgcccttcttcgagacctggatgcagacctgcatgcctgaggagggcaagatcctgaaccctgaccacccctgcttccgccccgactccaccaaagtggagtccctggtggccctgctcaacaactcctcggagatgaagctagtgcagatgaagtggcatgaggcctgtctcagcatctcagccgccatcttggaaatcctcaatgcctgggagaatggggtcctggccttcgagtccatccagaaaatcactgataacatcaaagggaaggtatgcagtctggcggtgtgtgctgtggcttggcttgtggcccacgtccggatgctggggctggatgagcgtgagaagtcgctgcagatgatccgccagctggcagggccactgtttagtgagaacaccctgcagttctacaatgagagggtggtgatcatgaactcgatcctggagcgcatgtgtgccgacgtgctgcagcagacagccacgcagatcaagtttccctccaccggggtggacacaatgccctactggaacctgctgccccccaagcggcccatcaaagaggtgctgacggacatttttgccaaggtgctggagaagggctgggtggacagccgctccatccacatctttgacaccctgctgcacatgggcggcgtctactggttctgcaacaacctgattaaggagctgctgaaggagacgcggaaggagcacacgctgcgggcagtggagctgctctactccatcttctgcctggacatgcagcaagtgaccctggtcctgctgggccacatcctacctggcctgctcactgactcctccaagtggcacagcctcatggaccccccgggcactgctcttgccaagctggccgtgtggtgtgccctcagttcctactcctcccacaagggacaggcgtccacccgccagaagaagagacaccgcgaagacattgaggattatatcagcctcttccccctggacgatgtgcagccttcgaagttgatgcgactgctgagctctaatgaggacgatgccaacatcctttcgagccccacagaccgatccatgagcagctccctctcagcctctcagctccacacggtcaacatgcgggaccctctgaaccgagtcctggccaacctgttcctgctcatctcctccatcctggggtctcgcaccgctggcccccacacccagttcgtgcagtggttcatggaggagtgtgtggactgcctggagcagggtggccgtggcagcgtcctgcagttcatgcccttcaccaccgtgtcggaactggtgaaggtgtcagccatgtccagccccaaggtggttctggccatcacggacctcagcctgcccctgggccgccaggtggctgctaaagccattgctgcactctgaggggcttggcatggccgcagtgggggctggggactggcgcagccccaggcgcctccaagggaagcagtgaggaaagatgaggcatcgtgcctcacatccgctccacatggtgcaagagcctctagcggcttccagttccccgctcctgactcctgacctccaggatgtctcccggtttcttctttcaaaatttcctctccatctgctggcacctgaggagagtgagcagcctggaccacaagcccagtggtcacccctgtgtgcgcccgccccagcccaggagtagtcttacctctgaggaactttctagatgcaaagtgtgtatgtgtgtgtgtgtgtgtgtgtgtgtgtgtttgtgtgtattttgtaatatgtgagggaaatctaccttcgttcatgtataaataaagctcctcgtggctccc

SEQ ID NO: 141 - DNA, 4511 bp, Homo sapiens
atgcgtcctccggttggcggcggctgcggcggtggcggctacgagcggctccgtttttttaaagggaaacgctgaggcgccgggggtgactgtgggggagggggaccccgagccgcggagacccccgggagaggcgacagaccccctctcccggagtaggagggctttgggcggacccagccctccaccccctcctgaggaggaggggggggaaatggaggctcggggcggttgaggcgagctccggggcggggggccggggcggggaagggggggtgcggggtggggagacgaggcgggcccggccgggccagggggggccgaagcgagctccggggatgagctcgggggcggctgggtgcgagctcctgcctctgaggcgaaggcggcggcggcggcagcagaggcggcggcgaggcccccatgggccggcggcgggcctcagccgcggcctccacgtctccgcacgccggcgggatggcgcccgggccccggaggagccgcgctagcggaggcctgctgccgcgctgctgaggcgagcccgccaaactcccctcccccccctcagtcctcgaccccccgcacctcgccccttccccaccccctcctccgcctcggtgcccggcgctgctccggaccactatgaccatgagatccgcggtgttcaaggcggccgcggcccctgccggcggcaatcctgagcagcgactggactacgagcgggctgcggcgctgggcgggcccgaggacgagcctggggcggccgaagcccacttcctcccccggcaccatccttctgctgcaattggacctcatcgaacagcagcagcagcagctgcaggccaaggaaaaggagatcgaggagctgaagtcagagagagacacgctccttgctcggattgaacgtatggaaaggcggatgcagctggtaaagaaggataacgagaaagaaaggcacaagctgtttcagggctatgaaactgaagagagagaggaaacagagctatctgagaaaattaaactggagtgccagccggagctttccgagacatcccagactctgcctcccaagcccttctcatgtgggcggagtggaaagggacataaaaggaaatccccatttggaagtacagaaagaaagactcctgttaaaaagctggctcctgaattttcaaaagtcaaaacaaaaactcctaagcactctcctattaaagaggaaccctgtggttccttatctgaaactgtttgtaaacgtgaattgaggagccaagaaaccccagaaaagccccggtcttcagtggacaccccaccaagactctccactccccaaaagggacccagcacccatcccaaggagaaagccttctcaagtgagatagaagatttgccgtacctttccaccacagaaatgtatttgtgtcgttggcaccagcctcccccatcaccgttaccattacgggaatcctctccaaagaaggaggagactgtagcaaggtgtctgatgccatcaagtgttgcaggagaaacttcagtcttggctgttccttcttggagggaccactcagtagagcctctaagggacccaaatccttcagaccttttggagaacctggatgacagtgtgttttcgaagcggcatgcaaaactggagctggatgagaagagaaggaaaagatgggatattcagaggatcagggaacaaagaattttacagcgactgcagctcagaatgtataaaaagaaaggaattcaggaatctgagcctgaggttacctcatttttccctgagccagatgatgttgaaagtttgatgattacccccttcttgcctgttgtagcatttggacgaccattaccaaaattaactccacagaattttgagctaccctggttggatgagcgtagccgatgcagattggagatccagaagaagcaaacacctcaccggacgtgtaggaaatagctgtgctggcaagaaccctgtcttcagatagttgtagcatgccattcccgagagtggcagagacctgtatatgtgacctttgtcctcacatatgttatcactcgctgataataccctttcatacttccttgactttgttttcattactctgatttcacaaaaactctttcattcggctaattgtgagttatggagggtgattgggatttcttttcccttttttgggaaatgggctctcaagctaaagctataggatggcagattcagaagtttcaggggtctgtttctatacatttgcctatgttaaaggggtaaaagggctctcttcattagacatgtggaagatgaagcagccccttcctttagagctgtgcctgcatggcactcttctcaccctggtacaccctccttatagtgggtatagtgatttttaaccctaaaataaaacaaacaacctcaccatgagctttaggaccagaagaggaatgacaagtgaagcgatgaagcaagccatcttcacagagtagaaaagacatcggagagttggtagataactgtctgaaaagatagttgttcatttgaaactattctgtgatacagtcatgtgggaagggatgtttggctgtgattattttttcagttaatggataacaatttctttactgctcaaaaaccaaaatctttggaaaagaaagtggggatggttagtttcagaacaagttacagctgtaaacaaaagcacttagtatttgggatggcatgccaaaacctgtataaatgtccttgtatcacatcacttctcaagtattccttcattgggcttcatccttttagcagaactcttggtggtgggatagagacttagggagggtagggggagagtgtggaaataggtgcttcctttggctggcaaatgtctacatcttgaaacaaacagatgtacctaatgagcttctccattcactttgtaaaaataatttgtatgtgtaccatcttggtcctctcccctcccgttttgttaaaatatcaggatagcactcccaggccactttggtctcagtgtaagatccctattaactatctgaaaggaaaatagagccaagacctctggtctcaaatatataggaattgcctttctttagtcttcaggactattgtgtgaaaacaagtaggggtctaatctcctagaaggtaggggcttttatccttaaagagaatatgtccccagattattagcacttttagaggagaagccaaggtatgtagggtgtgtggctggcccatcagtggagcacgaagagagaatgggataccattgtgggaagagaagaaaagttcctcaggggcctcccactgctaaagttttttgtgagatgttgatctgtgcttcctggatttgacttttaaaggaattattctggcagcacatgtagtattcttggatgatcttgctgctcttatttctccttttgtgtgtgtgtgtgtgtgtgtgtggctatgggttttcatttgtaactccatctgcttaggagagtgggctctctataagggaacctgctgtaaacttcattgcagcaaggatgtagagagaaataggacttaattccactaggggctctcatctcacaccttaaggaggagatttctagaaaaactgggccagattttctttgttctccatcattttaatgtggcaggctgttcagttttcttactcttacctatgtgatatttcttcgtaacgtgtccaaaaagaaaaaagacccaatcagtgtctcttgactttgttctttgatccctcagtttcttcttgatttcagcatgtgtcgggttcctaattttgggtatgagttagcaaatttaaccattgtgtttgtgccctacccaggggactccccagtttctgacttgaagtagactgagaagaatccacgaggtgctatctggccagatttaagtagattctatttccttggttctccctctccctgaggacctcttattttattgtcccctcttctaggttaattctcctttgatttgactttgttgagaaggaggttggacagtagattagcaaagttccaagtgcaaaattacagtgtgttagagtgtggggggaaaattagtcttatttttccctacatgggatacaacactgtgaattcaatcttcaactgaaggccctgcagttctcctaaaacatagttgtttgtttttctttaacaaagtttaagctagtgttaataaattaaaaaaaattgcttgtctgtctacttcagctttgttttatgcccatttcatattgttgtctgtgttgtaattcataacttttgataccatttctgatgtgtaaaattggttgtcttgtaaatatcttataaagagttcaattgtaaataaactattgtggctgttaatttttgaacttctgcttcaatttattatatttattggcaaacaaacaattctgcttgtatatttgaaacattggaaaaagaaatccattttctcaataaaaaagaataacacattattttccccttta

SEQ ID NO: 142 - DNA, 3890 bp, Homo sapiens
gttctccgtaagatggcggaccggcggcggcagcgcgcttcgcaagacaccgaggacgaggaatctggtgcttcgggctccgacagcggcggctccccgttgcggggaggcgggagctgcagcggtagcgccggaggcggcggcagcggctctctgccttcacagcgcggaggccgaaccggggcccttcatctgcggcgggtggagagcgggggcgccaagagtgctgaggagtcggagtgtgagagtgaagatggcattgaaggtgatgctgttctctcggattatgaaagtgcagaagactcggaaggtgaagaaggtgaatacagtgaagaggaaaactccaaagtggagctgaaatcagaagctaatgatgctgttaattcttcaacaaaagaagagaagggagaagaaaagcctgacaccaaaagcactgtgactggagagaggcaaagtggggacggacaggagagcacagagcctgtggagaacaaagtgggtaaaaagggccctaagcatttggatgatgatgaagatcggaagaatccagcatacatacctcggaaagggctcttctttgagcatgatcttcgagggcaaactcaggaggaggaagtcagacccaaggggcgtcagcgaaagctatggaaggatgagggtcgctgggagcatgacaagttccgggaagatgagcaggccccaaagtcccgacaggagctcattgctctttatggttatgacattcgctcagctcataatcctgatgacatcaaacctcgaagaatccggaaaccccgatatgggagtcctccacaaagagatccaaactggaacggtgagcggctaaacaagtctcatcgccaccagggtcttgggggcaccctaccaccaaggacatttattaacaggaatgctgcaggtaccggccgtatgtctgcacccaggaattattctcgatctgggggcttcaaggaaggtcgtgctggttttaggcctgtggaagctggtgggcagcatggtggccggtctggtgagactgttaagcatgagattagttaccggtcacggcgcctagagcagacttctgtgagggatccatctccagaagcagatgctccagtgcttggcagtcctgagaaggaagaggcagcctcagagccaccagctgctgctcctgatgctgcaccaccaccccctgataggcccattgagaagaaatcctattcccgggcaagaagaactcgaaccaaagttggagatgcagtcaagcttgcagaggaggtgccccctcctcctgaaggactgattccagcacctccagtcccagaaaccaccccaactccacctactaagactgggacctgggaagctccggtggattctagtacaagtggacttgagcaagatgtggcacaactaaatatagcagaacagaattggagtccggggcagccttctttcctgcaaccacgggaacttcgaggtatgcccaaccatatacacatgggagcaggacctccacctcagtttaaccggatggaagaaatgggtgtccagggtggtcgagccaaacgctattcatcccagcggcaaagacctgtgccagagccccccgcccctccagtgcatatcagtatcatggagggacattactatgatccactgcagttccagggaccaatctatacccatggtgacagccctgccccgctgcctccacagggcatgcttgtgcagccaggaatgaaccttccccacccaggtttacatccccaccagacaccagctcctctgcccaatccaggcctctatcccccaccagtgtccatgtctccaggacagccaccacctcagcagttgcttgctcctacttacttttctgctccaggcgtcatgaactttggtaatcccagttacccttatgctccaggggcactgcctcccccaccaccgcctcatctgtatcctaatacacaggccccatcacaggtatatggaggagtgacctactataaccccgcccagcagcaggtgcagccaaagccctccccaccccggaggactccccagccagtcaccatcaagccccctccacctgaggttgtaagcaggggttccagttaatacaagtttctgaatattttaaatcttaacatcatataaaaagcagcagaggtgagaactcagaagagaaatacagctggctatctactaccagaagggcttcaaagatatagggtgtggctcctaccagcaaacagctgaaagaggaggacccctgccttcctctgaggacaggctctagagagagggagaaacaagtggacctcgtcccatcttcactcttcacttgagttggctgtgttcgggggagcagagagagccagacagccccaagcttctgagtctagatacagaagcccatgtcttctgctgttcttcacttctgggaaattgaagtgtcttctgttcccaaggaagctccttcctgtttgttttgttttctaagatgttcatttttaaagcctggcttcttatccttaatattattttaattttttctctttgtttctgtttcttgctctctctccctgcctttaaatgaaacaagtctagtcttctggttttctagcccctctggattcccttttgactcttccgtgcatcccagataatggagaatgtatcagccagccttccccaccaagtctaaaaagacctggcctttcacttttagttggcatttgttatcctcttgtatacttgtattcccttaactctaaccctgtggaagcatggctgtctgcacagagggtcccattgtgcagaaaagctcagagtaggtgggtaggagcccttctctttgacttaggtttttaggagtctgagcatccatcaatacctgtactatgatgggcttctgttctctgctgagggccaataccctactgtggggagagatggcacaccagatgcttttgtgagaaagggatggtggagtgagagcctttgcctttaggggtgtgtattcacatagtcctcagggctcagtcttttgaggtaagtggaattagagggccttgcttctcttctttccattcttcttgctacaccccttttccagttgctgtggaccaatgcatctctttaaaggcaaatattatccagcaagcagtctaccctgtcctttgcaattgctcttctccacgtctttcctgctacaagtgttttagatgttactaccttattttccccgaattctatttttgtccttgcagacagaatataaaaactcctgggcttaaggcctaaggaagccagtcaccttctgggcaagggctcctatctttcctccctatccatggcactaaaccacttctctgctgcctctgtggaagagattcctattactgcagtacatacgtctgccaggggtaacctggccactgtccctgtccttctacagaacctgagggcaaagatggtggctgtgtctctccccggtaatgtcactgtttttattccttccatctagcagctggcctaatcactctgagtcacaggtgtgggatggagagtggggagaggcacttaatctgtaacccccaaggaggaaataactaagagattcttctaggggtagctggtggttgtgccttttgtaggctgttccctttgccttaaacctgaagatgtctcctcaagcctgtgggcagcatgcccagattcccagaccttaagacactgtgagagttgtctctgttggtccactgtgtttagttgcaaggatttttccatgtgtggtggtgttttttgttactgttttaaagggtgcccatttgtgatcagcattgtgacttggagataataaaatttagactataaacttg

SEQ ID NO: 143 - DNA, 7492 bp, Homo sapiens
attttgttcgcggacgctggggacggtgggagcagatccatttccgggttggcaaaaggggcggtggcggcggcggcggcggcggcggcggcggcgacggcgagaaagagcttgccggggggcgagcaggacaggacgaagccggagtgtaggcggcagaggattcgctcccagagcagctgcggccaggtatatgaatgacctaaaggtacaaataaagacggagagagaacagtgccaactgggagcagggcaagaatgccaattcctcctcccccgccacccccacctggtcctcctccacctcccacatttcatcaggcaaacacagagcagcccaagctgagtagagatgagcagcggggtcgaggcgccctcttacaggacatttgcaaagggaccaagctgaagaaggtgaccaacattaatgatcggagtgctcccatcctcgagaagccgaaaggaagcagtggtggctatggctctggaggagctgccctgcagcccaagggaggtctcttccaaggaggagtgctgaagcttcgacctgtgggagccaaggatggttcagagaacctagctggtaagccagccctgcaaatccccagttctcgagctgctgccccaaggcctccagtatctgccgccagcgggcgtcctcaggatgatacagacagcagccgggcctcactcccagaactgccccggatgcagagaccctctttaccggacctctctcggcctaataccaccagcagtacgggcatgaagcacagctcctctgcccctcccccaccacccccagggcggcgtgccaacgcaccccccacacctctgcctatgcacagcagcaaagcccccgcctacaacagagagaaacccttgccaccgacgcctggacaaaggcttcaccctggtcgagagggacctcctgctccacccccagtcaaaccacctccttcccctgtgaatatcagaacaggaccaagtggccagtctctggctcctcctcctccgccttaccgccagcctcctggggtccccaatggaccctctagccccactaatgagtcagcccctgagctgccacagagacacaattctttgcataggaagacaccagggcctgtcagaggcctagcacctcctccacccacctcggcctccccatctttactgagtaataggccacctcccccagcccgagaccctcccagtcggggagcagctcctccacccccaccacctgtgatccgaaatggtgccagggatgctccccctcccccaccaccataccgaatgcatgggtcagaacccccgagccgaggaaagcccccacctccaccctcaaggacgccagctgggccaccccctcctcctccaccgcccctgaggaatggccacagagattctatcaccactgtccggtctttcttggatgattttgagtcaaagtattccttccatccagtagaagactttcctgctccagaagaatataaacactttcagaggatatatcccagcaaaacaaaccgagctgcccgtggagccccacctctgccacccattctcaggtgaagcctggcttggtcccgttcctcaggaaaaggatggaccttctcttcttctcagatggtcccttccattcccctgaaacctgcatgagagctcctaacatgtttctccaatgcaatcaagccctagactccaaatgtcctcccagctcacctccatctatgcatctcatctctggatttggtgatcagactctatattgacagtaggatctcaaaccctgcatccatccttcctccagcaagccctgctagccacatgaggaacaagtttccgtgtcttctgccttcctcttggggaaaggtgccttgttgtgatgaattaactcactgttagggcagggtggagaatggtactccttccttctcctgtccactgtgggggaagcttggcaggtatattatatttcatcatttaggaggctggcatgaccaggacttatgggtgggaggggagcatttttagtgaagcaagaaaggagtttgccaagaagtgatctgttttaaaggtcatatttggagaaagggcaaggaattgggtctgctttatttttgggggtattttgtttttgttctcacctgctgcccccccaccccaccaccccagggataaattggatataaacactaaatactaatcagttgaacttaacatttaataaaaagaaagggtgaaataaactgaagaccattttagaactagtcagttctctgcagcaaagggaacaggagccatttgaaccctctgggacccctcaccccactgcttcagggtgctaggctgagggatgtttttcctcccccttaccgcccatgcccttgaaagaaaagtcactttttgtggagggcatcattcattcctgattcacaaaccccaaaaacctctggtgggagataggaagatagggcgtgggcctgggccttaacctcaatcttgtgtctgcctcagtcttttctgactggccctgaagttgtcagtggctctttctgtccttcagcccctggaaggtgctccaggataacaaagaagggcaggttgaagcccctcatggaaggagctggctttgtggggctgcaaaggacttttaagtcctgcctgtactgaagttcacagcccacctgactgagcagactcttcctgttcctttctctaccacccttgccttcccaggactgcacggtttaacacagcagagtacagaagggtgaagaagtgagcagaggcttatgaagatattcagatactcttctatgccaggaagcacaaagactttgttgagatttgcctcagttcagtagatcttccttggcagccagccataggttgtttctttgtcttccgggtcctaaagagcacagagaaaatggaggtccccagtctaggtaggaagctgattggatgaggacttctttttttccgacagcaggatggggctcttgggctccacacaccagatgctttggttttctacaactgttgctatgtgtagagggtgctcagagcgtggcatgagagcaaggagaccatggctactctttgaaatggatggggaaaattagcttaaaaatttaatcacgagattgcgccactgcactccagcctgggcgacagagccagactccgtctcaaaaaaaaaaaaaaaaaaaaaatttaatcacacacatcacaggcttaaactgtcttagagacctttccagttgattggatcacaggctagggatctgtgcatggtgccaggtgaaacccaagtctccccagtgctaggtgagggagggctcaacgggggtaatgtgtatggggtctgctgtcctttgccatcccctggaccatattaactctgggacagaccatgattaggtctgtcaccaaacttttcctaatcattttttatgtatcattcttctttctaatctgttagcagttatctcccagaagtatccctagcatcctgaagcaaacagaactgccgggcgctgtggcttatgcctgtaatctcagcaatttgggaggccgaggcgggcggatcacctgaggtcagaagttcgagaccagcctgtccaacatggtgaaaccccgtctccactaaaaacacaaaaattatctgggcgtggtggcatgtgcctgtagtcccagctactggggaggctgaggcaggagaatcgcttgaatccaggaggtggaggttgcagtgagtggagatggcgccactgcgctccagcccgggtgacagagtgaaactccatctcagaaaacaaacaaaccaaacaactgagagagggcatgctagtggagggaaaaggagagagtacaagagttgatactgcatcagagttccagggcagatactgacaagtgactgaactttgactgtgaagtcttcccatttatttttgaaatgggagtcgatgccttttgtacgttatcaaagtgtttttttttttttcctcctttactcagacatagagcatcaaaatatcacgagtaaagccaaaccccagcttttcactggggctgatatcttcctccccatggcccactgccccctcatattccccagcacttggactgtgtcacatgggtattgattgtatacttgttgtcttggcctcatgcaaaaaggcctgggtctagatctagtcagatgagttttttttagagcatgttgatgatacaacacctgtttaaatgtctgccttatatgttatttggtcccactgttaataatagatttattactatgtatatttactattgaagatgggaatgtgatctgcatagttatcagtctattttgtatgttgtaaaaagcttctaatttaggtttaaggtgggctggctacaagagcactaaaactcctcaccttttaaactgctctttttatctgcttgtgggaatgtcgtctctttcgtggaagattgggtggtctcatgttgaggctgttgcccagtcccattaactcccttgtccccccacagaaggaagagacattgcccagctaagcatcaggaagctgtgttaaaagcccttctatgggtttggttttgtgatgtttttccctaatgggaaaaacgttatagttgtttcttactgccctgtctgggaagcagggcaaacctccaggtttttaaatgagctagatgcccctcttcctcttctctggtcactgaacctggaccaaagcactttgatattccaggtgtgattttctctgtcatggggatttgctccactgcagagccccatcattttcacagcgtaggccaacagagtgagaacctagggctaccctagctgatggatgtgaggctgctgtctacaggagctcatcccagccctgttaactggcagtggcaaggatactcgtcatcggccattgcactggggaactccctcaccccatggcttcccaacttgaaacccagatttacctccagggagaggtgagaaaaaaattgtaaatagacttgctaaagagcaactcagggttggggtgtgttttaattctcctgatcacttgaaataatctgtaggctgagtgcttatgggggtgggggagaagggtgactccagggtccttccattttgtgaagctctgggggtggagtgtgggcatctgaggccctatgatggcactacattgagctgtctgcccttccggaaacccaacctgcaatcaactgcaaatcaaattcttcacattccagctacagtctttctttccccattgaatctcagtccctggccatgtggtcaaggtggctttctgttaagctaccctaatttcgggaatgggaggggagagaggagggccattacaactctgccttcaagactcatctcttaaaaacaaaacgaaacaaaactacaaccaccatcaaaaccacacgcaaaaaaaaaaaaaaaaaaaaaaaggataactttaaccgaaggaagggtttggttccattcaactccacattcattgtgcctttacttgcattagatttctgtgctttcttcctttccctctttgaagcaattaaaatcttccttgataactgctgtttctttctactcttgtttctggcaatttagtgggttccttctctagtggtcttaaatctcattccactggtggcaagatggggcctagccttcttttcacatgtctaatcttttcctttctcatggtgccctccatggaagtcacagtcaacactgaataaatgactagaatgacacgtgtgcgtgcgcacgcgtgtgcgtgtgtgtgttcatctgtctgcatgtggatcaatttcttttagaaaataatttattgtatgatttattttggagttatattctgattacagtgctccctctcccaaatagcattgattttttcccccctctaaaatgtataatctggtctcaggttggattctttggtacatttctctcttctggatgccatgcagcttaattaaaaccttgcttaaaaacaaaaagtgaaaattgtgtactcttgtctggaataccgcctcaggtggtggcacagagaggggagaaaacctttgcctcataatttgggtaagtgtagtggtttgattccaggtcccttgaaaaagtagatctactgaattgggcagactcatctatagctttctgagggtcttctctcctcctctccagctgtattttgaaaattacagttctagttggctgggcgcgatggctcatgtctgtaatcccagcactttgggaggccaaggcgggtggatcatttgaggtcaggagttcaagaccagcttggccaacatggtgaaaccccgtctctactgaaaatacaaaaattaaccggtgtcatggcgcatgcctgtagtcccagctactcgggaggccgaggcaggaaaatcacttgaacccaggaggcggaggttgcactgagctgagatcatgccactgcactaaaaaaaaaaaaaaaaaaaaaaaaaaaaaaaaaaaaaaattctagagttctagttacccttcctgggagattctgatggtccttattttattattattattatttttttttgagacaggatgttgctgtcatccaggctggagtgcagtggtgtgatcatagctcaccgcagcctccaactctcaagctcaagtgatcctcccacctcagcctcccgtgtagctgggaccacaggtgtgtaccactatgcctggctaattttgaaaatttttttgtaaagacagggtctccctatgttgcccagactggtctcaaattcctgggcttaagtgattgtcccacctcagcttctcaaagtgctgggattacaggcatgagccaccgcacccagccagtccttattttatatttccacctaactcccctttgcccacgatttcagggaacctaggaggcttcctggccttgtgaccttttccttgaatctcttataattctttctacctgtgttgcatggcagattctcagattgaggctaaagaaaagaagggtggggacaaagcatacagaatgtgtgtatctgtttttatgtgggtgttggctgtttttcgtcactgctttttaagctgaatcttagctggttttcttgaactttgactttaggtgtaaaaattcaaccagacattctctccttactgtggtcagctgacatcataaccactaaggcttaatgagcttaacttgcactttcatcactagcaaaggtcttgaagttatttctcttactgattcataatgggtgtgtgtatgaatcactctcacataatttagatataaaaacctatgaggatgagggagggaggggaagaaaaaaaaggactcctttcattttcatccgtacttcccagatgggctgaatctccgattatttgacccatcattgttattaatatggttaataaactacctatttattgattgaa

SEQ ID NO: 144 - DNA, 9612 bp, Homo sapiens
gtgtgtgtctggcagcacccgcggccggctgcagaacactgcgtgtcctgtgcgcgagtacgggtccggccgcgggtcccaccgcaagcgggcgtgtgcagctgcggctgcctggcgggcgagcttaggagggagctggagctgcggagcggcgggaacaggagcaggccgagggtcctctggccagaagaaatctggcctcggaacacgccattctccgcgccgcttccaataaccactaacatccctaacgagcatccgagccgagggctctgctcggaaatcgtcctggcccaactcggcccttcgagctctcgaagattaccgcatctatttttttttcttttttttcttttcctagcgcagataaagtgagcccggaaagggaaggagggggcggggacaccattgccctgaaagaataaataagtaaataaacaaactggctcctcgccgcagctggacgcggtcggttgagtccaggttgggtcggacctgaacccctaaaagcggaaccgcctcccgccctcgccatcccggagctgagtcgccggcggcggtggctgctgccagacccggagtttcctctttcactggatggagctgaactttgggcggccagagcagcacagctgtccggggatcgctgcacgctgagctccctcggcaagacccagcggcggctcgggatttttttgggggggcggggaccagccccgcgccggcaccatgttcctggcgaccctgtacttcgcgctgccgctcttggacttgctcctgtcggccgaagtgagcggcggagaccgcctggattgcgtgaaagccagtgatcagtgcctgaaggagcagagctgcagcaccaagtaccgcacgctaaggcagtgcgtggcgggcaaggagaccaacttcagcctggcatccggcctggaggccaaggatgagtgccgcagcgccatggaggccctgaagcagaagtcgctctacaactgccgctgcaagcggggtatgaagaaggagaagaactgcctgcgcatttactggagcatgtaccagagcctgcagggaaatgatctgctggaggattccccatatgaaccagttaacagcagattgtcagatatattccgggtggtcccattcatatcagatgtttttcagcaagtggagcacattcccaaagggaacaactgcctggatgcagcgaaggcctgcaacctcgacgacatttgcaagaagtacaggtcggcgtacatcaccccgtgcaccaccagcgtgtccaacgatgtctgcaaccgccgcaagtgccacaaggccctccggcagttctttgacaaggtcccggccaagcacagctacggaatgctcttctgctcctgccgggacatcgcctgcacagagcggaggcgacagaccatcgtgcctgtgtgctcctatgaagagagggagaagcccaactgtttgaatttgcaggactcctgcaagacgaattacatctgcagatctcgccttgcggatttttttaccaactgccagccagagtcaaggtctgtcagcagctgtctaaaggaaaactacgctgactgcctcctcgcctactcggggcttattggcacagtcatgacccccaactacatagactccagtagcctcagtgtggccccatggtgtgactgcagcaacagtgggaacgacctagaagagtgcttgaaatttttgaatttcttcaaggacaatacatgtcttaaaaatgcaattcaagcctttggcaatggctccgatgtgaccgtgtggcagccagccttcccagtacagaccaccactgccactaccaccactgccctccgggttaagaacaagcccctggggccagcagggtctgagaatgaaattcccactcatgttttgccaccgtgtgcaaatttacaggcacagaagctgaaatccaatgtgtcgggcaatacacacctctgtatttccaatggtaattatgaaaaagaaggtctcggtgcttccagccacataaccacaaaatcaatggctgctcctccaagctgtggtctgagcccactgctggtcctggtggtaaccgctctgtccaccctattatctttaacagaaacatcatagctgcattaaaaaaatacaatatggacatgtaaaaagacaaaaaccaagttatctgtttcctgttctcttgtatagctgaaattccagtttaggagctcagttgagaaacagttccattcaactggaacattttttttttttccttttaagaaagcttcttgtgatcctttggggcttctgtgaaaaacctgatgcagtgctccatccaaactcagaaggctttgggatatgctgtattttaaagggacagtttgtaacttgggctgtaaagcaaactggggctgtgttttcgatgatgatgatgatcatgatgatgatcatcatgatcatgatgatgatcatcatgatcatgatgatgattttaacagttttacttctggcctttcctagctagagaaggagttaatatttctaaggtaactcccatatctcctttaatgacattgatttctaatgatataaatttcagcctacattgatgccaagcttttttgccacaaagaagattcttaccaagagtgggctttgtggaaacagctggtactgatgttcacctttatatatgtactagcattttccacgctgatgtttatgtactgtaaacagttctgcactcttgtacaaaagaaaaaacacctgtcacatccaaatatagtatctgtcttttcgtcaaaatagagagtggggaatgagtgtgccgattcaatacctcaatccctgaacgacactctcctaatcctaagccttacctgagtgagaagccctttacctaacaaaagtccaatatagctgaaatgtcgctctaatactctttacacatatgaggttatatgtagaaaaaaattttactactaaatgatttcaactattggctttctatattttgaaagtaatgatattgtctcatttttttactgatggtttaatacaaaatacacagagcttctttcccctcataagtagtgttcgctctgatatgaacttcacaaatacagctcatcaaaagcagactctgagaagcctcgtgctgtagcagaaagttctgcatcatgtgactgtggacaggcaggaggaaacagaacagacaagcattgtcttttgtcattgctcgaagtgcaagcgtgcatacctgtggagggaactggtggctgcttgtaaatgttctgcagcatctcttgacacacttgtcatgacacaatccagtaccttggttttcaggttatctgacaaaggcagctttgattgggacatggaggcatgggcaggttctcctttctttggaaacacatccatgctgggatgcacagttcttttcctaaggattgtgtttactcctgactgcaacgtcttggccactgtttggagcagtttggtctgaaggtcattaaggatctgcttgcatcttgtttcatgtcctccgtgacagactgcagaccatgttagaagagaaggaaggtttgtggatcaagagggttgacattaggtttggtgagatgagttgcttggcacagatcagcagaacaggaccctggtgataaggcatctggctttgctaaccacttatcatcttccattattctctttcttaactaagtagacccgaaagtgcacttttgaagtctggtttagatggcgagattccgaatctacaatgatcgagtactggtggccacttttctccaacattaagtaaagaggaggagattccaccttcagaaagtgctgggaagcattggctttcttcccacattggtagaagagatggaggaggaaaccagggtgcacatttctacagatcccctttgcctgctggtgtttgccttgtaagataagtcactggggggaaggggaaatctatgaaatccaagataaaggcatagtctttcagctctattggtgttaaaagtatatttgtgtccaaatgttaatcaacacaaatgtacagtactcagtactgacttttttcacttcaaaatgttttcaagggaaattcagcagacacccaactgtatttaattagtgaaaagatctataaagactcttactttgaataaacacattaagtaagtgtgtcaaaatatttggaatgccagttatctatgagcgcatatctcttacagagtgtattttgttttcattaaggtatctctgtgtatctacactggactaatttcatagggatctgattctatgtgatccactgtagaaagctactgattacttctgcagtaacagcagctctaattagcatcagatgaccaaagcggaaatgggagtttcagcgctaacaagggcagccttcattgaagaatgcatgggtaggcaatatataaattacattttgaaaagcctcatctgtcaccaacaaatatctcatttttcttcagtgataaaagcatattcaagttaccagctcctcaatttgaaaatcagttgctgattaaataaatagggggaagcatcttgttcagggacaacacgttagagagattcttatcaaagcaagccaagcaaggtttccgccattcagtgtgatcttagtttgacacggtgaccctaaaacaccatcatttgccccagaactggagcacaataagttaaatcatttacctgtctcacttcttcttggcgtgcttaaaagcaaaaatgattcgctacttcctgtccttcagtccgggcatttggggtgccactgaagacaggggttatctgctgaggtttgggtgtcttgcaggaagtatctcattgcagttgattttgatgaaaccaaacagtaactagggtccatgcagaccgtgactccctgattacatctagccatgccctacttatttcagagagaaagagagggggaataaaggcagtattgccacactgattagaagcacattcattccactttgatgttgaatatttttgaccgatacatgcttgagtatctttttaatagagcacatgaaggaagaagcacacaatatagagaaggaattgagaatgccaattacatatttatttttccatacctgatttttttcaagtctgtaataaaaaaagtataagttgagattaacataggttatttttcatgaagtatagcaaacgatctagaatgtgataggagtgtggtttccatttctttttttttttttttaacagacttttgtgctgtagtaagaatgtcttagaagttgtgtcttcgagttcctcaaacaccggacagggctcccccagagctgcctcagcctttgatttggtccatattcagacacttcctgtcttgcatacactctgaggatgggccgcttctagctgccgcccgtctccctcttgccttcttgtctctaaatcagacactcccaagcactccatctgctatactaggagagtgggagagccaaagcattttggagtccatgtaaagtgcctgggaaaagagatgtaagagcagtgggagtttatataattagcgaattcttttctcagaattcagcggaaatgtatttctgttgttattatttacaaaattgtggcctcagaggagctgtcttttggaaaataagttttcattcatgcagttagttagacatgcacgatgtacttgaatcaataaactgtggaccagaaaagggctgcttaaatgaattcacgtgttctaattctctttcgaggctgttgatgacctcctggattcatacccccatgatctgtcttgctcttgcctctgttctttgataaagcacatcagactatgtgacacccatcttttcaagaacgacctaaaagcaatgacaacaggcaggagagaattaccactggcctgggcacagtgacagcagaaggcccacctgagcttggagagttggcgagataaggcaaaatcaaggtgcaacagtgggccatgttccaagggtgaatggatctgagagtccgctgatgttccttactgatcagaacagggaccttctaacgaaacagccagagttccttgaatcaggcagaagttctttagagacaggaagccagagctattgataatatccgaacgacagaggaaggaatttcttattagaaattctaaaataaaacaagtggggatttggttggatacccttagaagctacatttttctctcatccctaagatagatatctcaagtgtatatctgacacctcttggctttgacacggctctgcttctcaagtgaccatttgttttaagtctgttgtctagaattctttgtgggggctggacctctgaaaaagattctcactgcagaggctttaaatctgtgtttttttccactccctccgtcctgggatgtattcggtaggacatttcatttatatcaggatattggctgattcagctctctttcatcgttattattcaggcctccctccaccaccttgttctttattgcctaagtattgccctccccaattcttcatcgtaatagctctaaatttagtttgacccaaattaatttttgttccaacagatatattttaagacagagaagcctctctcaggagccagatgatctgaagatgatgctaatccccaaatacgaagttcctccagctaactctcctctgagctccctcttcttagctttgggattggggatggtctcatccttgccaggaatccctttgttgctcccagtgtctctgatgagcttctcctccctcccagagacaatgcaggggtggttttcagcagaatgtgccacctgcacttctgattgttctgagacccagcccagaggggtggagaaggcgcacaaaccctattccaataaactgcctgcagagaaccacagcctgctaatagtcgttgaggtctcagccccctaaggtctccaagctcatttgaccagcgcagctgcgacttcggctgtctgcctctggcaggtgccaatatcagcatcttgtcccactgccatggggagttaatttttgctccagggcagctgccaagcccagcaccggcatcaatagaaggttttctctgattttcttctcttcctctcaggctaggctttcttaccaatccccaattttcttctgtagggcgccaggagactggccagagatctttagactcttacttagtttgaacatctcttgctgctcacacccaggcttcttcagcagaaagcatgacccatagtaggtactcagaaactggttgaatgaaaagccttgacatttaagggctttattctgtcatacggtagcaagaactggcctattggcatcgtattcctggcattgagctgtattgaccctgaatgtgtcctcctgaggtttttgagggtgacctaggagaaagggtctgaaaaagcactgggatccaagtgactttaaatctgcccgtggcatttcctgctgagaggcgagaaactagcatctctcccaacaggctcacatccgccaggaaggacagagcccaaaacgggggtagactttgtgggaaattcgccagttagtccgctgagattttaatctgcctcaagcacaggatgctgacaagaaaggtagaccactcccccgatcccagacaaaccccaggggtgacaacttctccatcagtatcctgagaagcaacatcaaatgcttaccaagtcagcacgtttactgagtgagtactctgacggaataaaccagcatttggagctgaacttgagaacacagggccctctgacagcagcttagggaaacacccatcccttccagattggcagaatccttccatttcatgtccttcggagacgctgtattctctttacaaatcattcatgaaactgagactcagtctcccaggggtaagtcctgggccacgtgcaaacaatggcaaatccagctcttccatgatagagaaggcaaacacacccaccttcatcctgagcctaaaaggccacctctgagcacttgggcagccactcctctgggcctcagagggccatgagcttggccaggtaggcacagcggcggggaagtcacagctgtcaggtaccggccatggtgcaggtgggaataggagatgccagagctgctttagctgaggaaagcaaacagtcagcagtgctcaaaggagcaaaacttcgaatgtgcacattgacccctgacacctgcaagcataacacagatcctaagactagagtgaagtaggaagaagaattagaaaatccagtggatgtcctgagtatagggaaccagggccgttgaaaatcagtaaaggttgattacctggggcgagaccgggtgactgtggcagtgcaggtgaaggtaccctggaccttctcagttcgctggcacataaggctccgccaataaagcgtggttctctctgtcacacacacacacacacacacacacacacacacacacacacacacacacacaatgattggagggctatatgatccagcattagcttcctggtgtgccaagcatgcttgatcgggaatttttttttattattattattttttagctgtagctgaaggcatttctcggatgtggagaggagaatggaaatcgcagaaccaaatcagtttgccctgccatatttggctgtggtctgtcattgggcatttctgatgtgcttttctggattcaggaagagctgattgtcctccgagggttgaaaaaaaaaaaacagtttcagaaacctgaatccagggccttatagttctcctcattatctatcttcttctcccttccctcgcccaagggagtgggggaaacacttttcactgcagagtttgctttaaagttttcccatcttgcgtgcattatcccttgatattaaaattattttctcagtttaatccaactcctgctgagaagctgtgtgagatttaggctgtggggtttttttcttgtactcttttggatggtgttgcatttttcactcttaacccgagggtgtgtttcagcttatgttcgttctgtttcatgcaggtttatagcacggtagagtagaaggcggcttctgatttttagggtatttttagaattcattcctgagtgaggggttcagacacccagtctcctcggaacaggggtgaggggtcgactgagctttgttgagaagcctccagttaggcttcgggcgggtctccatgttatattgtgtgtttactgagcttcccactggtagaagatgacacatttgtccatcgtcctgtgtatctgctttccagaggacaccggagcattctcctggggtcactcccacatggctgcctcacatagctgttttgcaacagcctttattgccaacacccttggaagaacatctcctgtagaagtacaagttttgcaatatggactttggaagtggttttgtgatgttcgaattttctgttagcctattgctcaagcactacagaatgtacatagtccctttggccatcctctcaccccagaatatcctaataaacattgttttcttttttaaaaaaaaaaaaaaaaaaaa

SEQ ID NO: 145 - DNA, 6762 bp, Homo sapiens
ggacggccgagcggcagggcgctcgcgcgcgcccactagtggccggaggagaaggctcccgcggaggccgcgctgcccgccccctcccctggggaggctcgcgttcccgctgctcgcgcctgcgccgcccgccggcctcaggaacgcgccctcttcgccggcgcgcgccctcgcagtcaccgccacccaccagctccggcaccaacagcagcgccgctgccaccgcccaccttctgccgccgccaccacagccaccttctcctcctccgctgtcctctcccgtcctcgcctctgtcgactatcaggtgaactttgaaccaggatggctgagccccgccaggagttcgaagtgatggaagatcacgctgggacgtacgggttgggggacaggaaagatcaggggggctacaccatgcaccaagaccaagagggtgacacggacgctggcctgaaagaatctcccctgcagacccccactgaggacggatctgaggaaccgggctctgaaacctctgatgctaagagcactccaacagcggaagatgtgacagcacccttagtggatgagggagctcccggcaagcaggctgccgcgcagccccacacggagatcccagaaggaaccacagctgaagaagcaggcattggagacacccccagcctggaagacgaagctgctggtcacgtgacccaagagcctgaaagtggtaaggtggtccaggaaggcttcctccgagagccaggccccccaggtctgagccaccagctcatgtccggcatgcctggggctcccctcctgcctgagggccccagagaggccacacgccaaccttcggggacaggacctgaggacacagagggcggccgccacgcccctgagctgctcaagcaccagcttctaggagacctgcaccaggaggggccgccgctgaagggggcagggggcaaagagaggccggggagcaaggaggaggtggatgaagaccgcgacgtcgatgagtcctccccccaagactcccctccctccaaggcctccccagcccaagatgggcggcctccccagacagccgccagagaagccaccagcatcccaggcttcccagcggagggtgccatccccctccctgtggatttcctctccaaagtttccacagagatcccagcctcagagcccgacgggcccagtgtagggcgggccaaagggcaggatgcccccctggagttcacgtttcacgtggaaatcacacccaacgtgcagaaggagcaggcgcactcggaggagcatttgggaagggctgcatttccaggggcccctggagaggggccagaggcccggggcccctctttgggagaggacacaaaagaggctgaccttccagagccctctgaaaagcagcctgctgctgctccgcgggggaagcccgtcagccgggtccctcaactcaaagctcgcatggtcagtaaaagcaaagacgggactggaagcgatgacaaaaaagccaagacatccacacgttcctctgctaaaaccttgaaaaataggccttgccttagccccaaacaccccactcctggtagctcagaccctctgatccaaccctccagccctgctgtgtgcccagagccaccttcctctcctaaatacgtctcttctgtcacttcccgaactggcagttctggagcaaaggagatgaaactcaagggggctgatggtaaaacgaagatcgccacaccgcggggagcagcccctccaggccagaagggccaggccaacgccaccaggattccagcaaaaaccccgcccgctccaaagacaccacccagctctggtgaacctccaaaatcaggggatcgcagcggctacagcagccccggctccccaggcactcccggcagccgctcccgcaccccgtcccttccaaccccacccacccgggagcccaagaaggtggcagtggtccgtactccacccaagtcgccgtcttccgccaagagccgcctgcagacagcccccgtgcccatgccagacctgaagaatgtcaagtccaagatcggctccactgagaacctgaagcaccagccgggaggcgggaaggtgcagataattaataagaagctggatcttagcaacgtccagtccaagtgtggctcaaaggataatatcaaacacgtcccgggaggcggcagtgtgcaaatagtctacaaaccagttgacctgagcaaggtgacctccaagtgtggctcattaggcaacatccatcataaaccaggaggtggccaggtggaagtaaaatctgagaagcttgacttcaaggacagagtccagtcgaagattgggtccctggacaatatcacccacgtccctggcggaggaaataaaaagattgaaacccacaagctgaccttccgcgagaacgccaaagccaagacagaccacggggcggagatcgtgtacaagtcgccagtggtgtctggggacacgtctccacggcatctcagcaatgtctcctccaccggcagcatcgacatggtagactcgccccagctcgccacgctagctgacgaggtgtctgcctccctggccaagcagggtttgtgatcaggcccctggggcggtcaataattgtggagaggagagaatgagagagtgtggaaaaaaaaagaataatgacccggcccccgccctctgcccccagctgctcctcgcagttcggttaattggttaatcacttaacctgcttttgtcactcggctttggctcgggacttcaaaatcagtgatgggagtaagagcaaatttcatctttccaaattgatgggtgggctagtaataaaatatttaaaaaaaaacattcaaaaacatggccacatccaacatttcctcaggcaattccttttgattcttttttcttccccctccatgtagaagagggagaaggagaggctctgaaagctgcttctgggggatttcaagggactgggggtgccaaccacctctggccctgttgtgggggtgtcacagaggcagtggcagcaacaaaggatttgaaacttggtgtgttcgtggagccacaggcagacgatgtcaaccttgtgtgagtgtgacgggggttggggtggggcgggaggccacgggggaggccgaggcaggggctgggcagaggggagaggaagcacaagaagtgggagtgggagaggaagccacgtgctggagagtagacatccccctccttgccgctgggagagccaaggcctatgccacctgcagcgtctgagcggccgcctgtccttggtggccgggggtgggggcctgctgtgggtcagtgtgccaccctctgcagggcagcctgtgggagaagggacagcgggtaaaaagagaaggcaagctggcaggagggtggcacttcgtggatgacctccttagaaaagactgaccttgatgtcttgagagcgctggcctcttcctccctccctgcagggtagggggcctgagttgaggggcttccctctgctccacagaaaccctgttttattgagttctgaaggttggaactgctgccatgattttggccactttgcagacctgggactttagggctaaccagttctctttgtaaggacttgtgcctcttgggagacgtccacccgtttccaagcctgggccactggcatctctggagtgtgtgggggtctgggaggcaggtcccgagccccctgtccttcccacggccactgcagtcaccccgtctgcgccgctgtgctgttgtctgccgtgagagcccaatcactgcctatacccctcatcacacgtcacaatgtcccgaattcccagcctcaccaccccttctcagtaatgaccctggttggttgcaggaggtacctactccatactgagggtgaaattaagggaaggcaaagtccaggcacaagagtgggaccccagcctctcactctcagttccactcatccaactgggaccctcaccacgaatctcatgatctgattcggttccctgtctcctcctcccgtcacagatgtgagccagggcactgctcagctgtgaccctaggtgtttctgccttgttgacatggagagagccctttcccctgagaaggcctggccccttcctgtgctgagcccacagcagcaggctgggtgtcttggttgtcagtggtggcaccaggatggaagggcaaggcacccagggcaggcccacagtcccgctgtcccccacttgcaccctagcttgtagctgccaacctcccagacagcccagcccgctgctcagctccacatgcatagtatcagccctccacacccgacaaaggggaacacacccccttggaaatggttcttttcccccagtcccagctggaagccatgctgtctgttctgctggagcagctgaacatatacatagatgttgccctgccctccccatctgcaccctgttgagttgtagttggatttgtctgtttatgcttggattcaccagagtgactatgatagtgaaaagaaaaaaaaaaaaaaaaaaggacgcatgtatcttgaaatgcttgtaaagaggtttctaacccaccctcacgaggtgtctctcacccccacactgggactcgtgtggcctgtgtggtgccaccctgctggggcctcccaagttttgaaaggctttcctcagcacctgggacccaacagagaccagcttctagcagctaaggaggccgttcagctgtgacgaaggcctgaagcacaggattaggactgaagcgatgatgtccccttccctacttccccttggggctccctgtgtcagggcacagactaggtcttgtggctggtctggcttgcggcgcgaggatggttctctctggtcatagcccgaagtctcatggcagtcccaaaggaggcttacaactcctgcatcacaagaaaaaggaagccactgccagctggggggatctgcagctcccagaagctccgtgagcctcagccacccctcagactgggttcctctccaagctcgccctctggaggggcagcgcagcctcccaccaagggccctgcgaccacagcagggattgggatgaattgcctgtcctggatctgctctagaggcccaagctgcctgcctgaggaaggatgacttgacaagtcaggagacactgttcccaaagccttgaccagagcacctcagcccgctgaccttgcacaaactccatctgctgccatgagaaaagggaagccgcctttgcaaaacattgctgcctaaagaaactcagcagcctcaggcccaattctgccacttctggtttgggtacagttaaaggcaaccctgagggacttggcagtagaaatccagggcctcccctggggctggcagcttcgtgtgcagctagagctttacctgaaaggaagtctctgggcccagaactctccaccaagagcctccctgccgttcgctgagtcccagcaattctcctaagttgaagggatctgagaaggagaaggaaatgtggggtagatttggtggtggttagagatatgcccccctcattactgccaacagtttcggctgcatttcttcacgcacctcggttcctcttcctgaagttcttgtgccctgctcttcagcaccatgggccttcttatacggaaggctctgggatctcccccttgtggggcaggctcttggggccagcctaagatcatggtttagggtgatcagtgctggcagataaattgaaaaggcacgctggcttgtgatcttaaatgaggacaatccccccagggctgggcactcctcccctcccctcacttctcccacctgcagagccagtgtccttgggtgggctagataggatatactgtatgccggctccttcaagctgctgactcactttatcaatagttccatttaaattgacttcagtggtgagactgtatcctgtttgctattgcttgttgtgctatggggggaggggggaggaatgtgtaagatagttaacatgggcaaagggagatcttggggtgcagcacttaaactgcctcgtaacccttttcatgatttcaaccacatttgctagagggagggagcagccacggagttagaggcccttggggtttctcttttccactgacaggctttcccaggcagctggctagttcattccctccccagccaggtgcaggcgtaggaatatggacatctggttgctttggcctgctgccctctttcaggggtcctaagcccacaatcatgcctccctaagaccttggcatccttccctctaagccgttggcacctctgtgccacctctcacactggctccagacacacagcctgtgcttttggagctgagatcactcgcttcaccctcctcatctttgttctccaagtaaagccacgaggtcggggcgagggcagaggtgatcacctgcgtgtcccatctacagacctgcagcttcataaaacttctgatttctcttcagctttgaaaagggttaccctgggcactggcctagagcctcacctcctaatagacttagccccatgagtttgccatgttgagcaggactatttctggcacttgcaagtcccatgatttcttcggtaattctgagggtggggggagggacatgaaatcatcttagcttagctttctgtctgtgaatgtctatatagtgtattgtgtgttttaacaaatgatttacactgactgttgctgtaaaagtgaatttggaaataaagttattactctgattaaa

SEQ ID NO: 146 - DNA, 1834 bp, Homo sapiens
gtggtcctctgatcaacataggctggtgggagtacaggactcgcctcctcagggttccctgtgctgccacttttcagccatggccacaagtgaacagagtatctgccaagcccgggcttccgtgatggtctacgatgacaccagtaagaaatgggtaccaatcaaacctggccagcagggattcagccggatcaacatctaccacaacactgccagcaacaccttcagagtcgttggagtcaagttgcaggatcagcaggttgtgatcaattattcaatcgtgaaagggctgaagtacaatcaggccacgccaaccttccaccagtggcgagatgcccgccaggtctacggcttaaactttgcaagtaaagaagaggcaaccacgttctccaatgcaatgctgtttgccctgaacatcatgaattcccaagaaggaggcccctccagccagcgtcaggtgcagaatggcccctctcctgatgagatggacatccagagaagacaagtgatggagcagcaccagcagcagcgtcaggaatctctagaaagaagaacctcggccacagggcccatcctcccaccaggacatccttcatctgcagccagcgcccccgtctcatgtagtgggcctccaccgccccccccacccccagtcccacctccacccactggggctaccccacctcccccacccccactgccagccggaggagcccaggggtccagccacgacgagagctccatgtcaggactggccgctgccatagctggggccaagctgagaagagtccaacggccagaagacgcatctggaggctccagtcccagtgggacctcaaagtccgatgccaaccgggcaagcagcgggggtggcggaggaggcctcatggaggaaatgaacaaactgctggccaagaggagaaaagcagcctcccagtcagacaagccagccgagaagaaggaagatgaaagccaaatggaagatcctagtacctccccctctccggggacccgagcagccagccagccacctaactcctcagaggctggccggaagccctgggagcggagcaactcggtggagaagcctgtgtcctcgattctgtccagaaccccgtctgtggcaaagagccccgaagctaagagcccccttcagtcgcagcctcactctaggatgaagcctgctgggagcgtgaatgacatggccctggatgccttcgacttggaccggatgaagcaggagatcctagaggaggtggtgagagagctccacaaggtgaaggaggagatcatcgacgccatcaggcaggagctgagtgggatcagcaccacgtaaggggccggcctcgctgcgctgattcgtcgagcccatccggcgacagaggacagccagaagcccagccagccccagactccagtgcaccagagcacgcacaggagcctgggcgcgctgctgtgaaacgtcctgacctgtgatcacacatgacagtgaggaaaccaagtgcaactcctgggtttttttagattctgcctgacacggaacaccaggtctgctcgtcttttttgtgttttatatttgcttatttaaggtacatttctttgggtttctagagacgcccctaagtcacctgcttcattagacggtttccaggttttctcccaggtgacgctgttagcgcctcagctggcggtgacagccggcccagcgtggcgccaccacacaccgcagagctgtccaggcacagctccgtccccagcgctcatggtgttgaaactgtctgtcatgcaccacggtgtctgtgtccacacagtaataaacggtttactgtccgca

SEQ ID NO: 147 - DNA, 4176 bp, Homo sapiens
cttctggatgtgagacaggcggatctcacccacgcctgccagcagctcctcggagaactgtgttcctgggtcagccctggcccagaggagcgccggggacccgcagagtgctgctgaagtcaaggctacaactcacctaggatctggggcgccagccctccggtgggcagggcgttctcctcccccaccccctccccgcacgatgacatcaagtgtttggcgttgagttgctccataaaagctgcccggggaagccaggagagcgaagggcggacgtactcgccacggcacccaggctgcgcgcacgcggtcccggtgtgcagctggagagcgagcggccaccgggagcccccggcacagcccgcgcccgccccgcaggagcccgcgaagatgccccggcgcagcctgcacgcggcggccgtgctcctgctggtgatcttaaaggaacagccttccagcccggccccagtgaacggttccaagtggacttattttggtcctgatggggagaatagctggtccaagaagtacccgtcgtgtgggggcctgctgcagtcccccatagacctgcacagtgacatcctccagtatgacgccagcctcacgcccctcgagttccaaggctacaatctgtctgccaacaagcagtttctcctgaccaacaatggccattcagtgaagctgaacctgccctcggacatgcacatccagggcctccagtctcgctacagtgccacgcagctgcacctgcactgggggaacccgaatgacccgcacggctctgagcacaccgtcagcggacagcacttcgccgccgagctgcacattgtccattataactcagacctttatcctgacgccagcactgccagcaacaagtcagaaggcctcgctgtcctggctgttctcattgagatgggctccttcaatccgtcctatgacaagatcttcagtcaccttcaacatgtaaagtacaaaggccaggaagcattcgtcccgggattcaacattgaagagctgcttccggagaggaccgctgaatattaccgctaccgggggtccctgaccacacccccttgcaaccccactgtgctctggacagttttccgaaaccccgtgcaaatttcccaggagcagctgctggctttggagacagccctgtactgcacacacatggacgacccttcccccagagaaatgatcaacaacttccggcaggtccagaagttcgatgagaggctggtatacacctccttctcccaaggcatcatcctctcactggccctggctggcattcttggcatctgtattgtggtggtggtgtccatttggcttttcagaaggaagagtatcaaaaaaggtgataacaagggagtcatttacaagccagccaccaagatggagactgaggcccacgcttgaggtccccggagctcccgggcacatccaggaaggaccttgctttggaccctacacacttcggctctctggacacttgcgacacctcaaggtgttctctgtagctcaatctgcaaacatgccaggcctcagggatcctctgctgggtgcctccttgccttgggaccatggccaccccagagccatccgatcgatggatgggatgcactctcagaccaagcagcaggaattcaaagctgcttgctgtaactgtgtgagattgtgaagtggtctgaattctggaatcacaaaccaagccatgctggtgggccattaatggttggaaaacactttcatccggggctttgccagagcgtgctttcaagtgtcctggaaattctgctgcttctccaagctttcagacaagaatgtgcactctctgcttaggttttgcttgggaaactcaacttctttcctctggagacggggcatctccctctgatttccttctgctatgacaaaacctttaatctgcaccttacaactcggggacaaatggggacaggaaggatcaagttgtagagagaaaaagaaaacaagagatatacattgtgatatattagggacactttcacagtcctgtcctctggatcacagacactgcacagaccttagggaatggcaggttcaagttccacttcttggtggggatgagaagggagagagagctagagggacaaagagaatgagaagacatggatgatctgggagagtctcactttggaatcagaattggaatcacattctgtttatcaagccataatgtaaggacagaataatacaatattaagtccaaatccaacctcctgtcagtggagcagttatgttttatactctacagattttacaaataatgaggctgttccttgaaaatgtgttgttgctgtgtcctggaggagacatgagttccgagatgacccaatctgcctttgaatctggaggaaataggcagaaacaaaatgactgtagaacttattctctgtaggccaaatttcatttcagccacttctgcaggatccctactgccaacctggaatggagacttttatctacttctctctctctgaagatgtcaaatcgtggtttagatcaaatatatttcaagctataaaagcaggaggttatctgtgcagggggctggcatcatgtatttaggggcaagtaataatggaatgctactaagatactccatattcttccccgaatcacacagacagtttctgacaggcgcaactcctccattttcctcccgcaggtgagaaccctgtggagatgagtcagtgccatgactgagaaggaaccgacccctagttgagagcaccttgcagttccccgagaactttctgattcacagtctcattttgacagcatgaaatgtcctcttgaagcatagctttttaaatatctttttccttctactcctccctctgactctaagaattctctcttctggaatcgcttgaacccaggaggcggaggttgcagtaagccaaggtcatgccactgcactctagcctgggtgacagagcgagactccatctcaaaaaaaaaaaaaaaaaaattattctgtaccatcacaacttttcacaacgatggcaagccttatgtcttgggagcctgttttgctaggcaaagttacaagtgacctaatgggagctcaaatgtgtgtgtgtctctctgtgtgtttgtgtgtgtgtgtgcactcaagacctctaacagcctcgaagcctggggtggcatcccggccttgccattagcatgcctcatgcatcatcagatgacaaggacaaccctcatgacgaagcaacatgaattagggggcctcttggccttggtccaaaattgtcaatcagaaatgaacataaaggactccagagcagtgggactgtctgtcaaaagactctgtatatcttttgtggatgagttttgtgagagaacagagagaccattgtacctggcacaagggctgttcatgaaaagggagacttactgggaggtgcaagacagtggcatttctcctctcctcttgctgctcagcacagccctggattgcagccccgaggctgagaccagacaaagcccgggaggcagaaagatgctccaagaaccaacactatcaatgtctttgcaaatcctcacaggattcctgtgggtccagctttggaactgggaaacctttcttcggatccgcactcattccactgatgccagctgcccctgaaggatgccagtactgtggtgtgtgagtctcagcagccgcccacacgctcctaactctgctgcatggcagatgcctaggtggaaatagcaaaaacaaggcccaggctggggccagggccagaggggaaggccctggattctcactcatgtgagatcttgaatctctttctttgttctgtttgtttagttagtatcatctggtaaaatagttaaaaaacaacaaaaaactctgtatctgtttctagcatgtgctgcattgactctattaatcacatttcaaattcaccctacattcctctcctcttcactagcctctctgaaggtgtcctggccagccctggagaagcactggtgtctgcagcacccctcagttcctgtgcctcagcccacaggccactgtgataatggtctgtttagcacttctgtatttattgtaagaatgattataatgaagatacacactgtaactacaagaaattataaatgtttttcacatca

SEQ ID NO: 148 - DNA, 13920 bp, Homo sapiens
cctccccagtcatttaggacaatttcctaagtcgaagctagagatgcgtgatgcgtttggtgacttttcctgggttcttgcttaagcggagccacaggttgtgggggcggccaggcctctggggaagagcaggtgccgcggtgccggcgcgccagcagcccgcggccaaggccacctgctcccagggccccggcacctctgcggggaggcggcaggcagaggacgcgcgcgcagtcgcgcaggagccctcaggcgagtgggggaagcatcgcaagagacgcggacctggagcgcggtcactgcgttaccgcagcgacctgggttacctaagccggcgggactgagaggccgctgcgcgtgggcaggggctcagattgcgcccgcggtgcctgtcccggcccccaccccggaacgattgcagccctgcggggctcgccgcccacaccgcgctgaggacgctgcccaagccaggcgcccgcccccgcccgcggtctcagccgctcgcagcgcgccgcccccagacgcgcgtggctgctggcgagggctgagaccgcgctcccgccggccagttcccagcagcagcgcatcctccctgctccgcgccttcgctccggacccgcgtcgtcgcagccccgcggtgatgagccccgagccggtcccgccgccgccgccgccccagtgtcctggctgcgaccgcgcggagccgatcgcccagcgcttagaggagggcgacgaggccttccgcgcgggcgactacgagatggcagccgagctctttcgctccatgctagccgggctggcgcagccggaccgcggcctgtgcctgaggctgggggacgcgctggcccgcgccggccgcctccccgaagccctgggcgcgttccgcggcgccgcgcggctcggggcgctgcggccggaggagctggaagagctggcgggcggcctggtgcgcgccgtgggcctgcgcgaccggccgctgtccgcggagaacccgggcggcgagcccgaggcgcccggcgagggagggccggccccggagccccgcgcgccccgcgacctgctcggctgcccgcgctgccggcggctgctgcataagccggtgacgctgccctgcgggctcacagtctgcaagcgctgcgtggagccagggcccgcgcggccgcaggtgcggcgcgtgaacgtggtgctgagcggcctgctggagaagtgcttcccggccgagtgccggctgcgcaggctggcaggccaggcgcggagcctgcagcgccagcagcagccggaggccgcgctgctcaggtgcgaccaggccctggagctggctcctgatgataattcattattgctgctgcgggcggagttatatttgaccatgaagaactatgagcaagctctccaagatgccagtgcagcttgtcagaatgaacctctcttgattaagggacatcaagtaaaagctcaggctctttctggattgggaagaagtaaggaagtgttaaaggaatttctctactgccttgctctgaatcctgaatgtaactctgtgaagaaagaagcacagaaggtaatgtgtgaagtgctgttttcagctacagcaaatgtgcatgaaaatttaacatcttccatccaaagcagattaaaggctcagggtcacagccacatgaatgcccaggctctgctggaagaaggtgatgcagggagctcggagaattcatctgagaaatctgatatgcttggaaataccaattcttcagttttgtattttatactgggtctacactttgaagaggataaaaaggcgttagaaagcatccttccaacagcacccagcgctggcttaaagagacagtttccggatgacgtggaggatgcacctgacctgaacgcccctggaaaaattcccaagaaagatctctcacttcaaaggagcccaaactctgagacagaagaaagtcaggggctctcgcttgatgtaactgactttgagtgtgccctctgcatgagattgctctttgaacctgtcactacgccctgtggacacacattttgcctaaaatgccttgagcgctgccttgaccacgccccacactgtcctttgtgcaaagacaaactttcggaattattggcaagcagaaactttaacataactgttctggccgaagaattaatatttcgatatttgccggatgaattgtctgataggaagagaatttatgatgaagaaatgtcagaactgtcaaatctgaccagagacgtccccatctttgtgtgtgccatggccttccccacggtcccatgtccactccacgtttttgagccccgctatcggcttatgataagaagatgcatggaaactggcaccaagcggtttggcatgtgtttatctgctgagcacgcggggctttcagagtatggatgcatgctggagattaaggacgtgagaacgtttcctgatggaagttctgttgtagacgcgattggcatcagtcggttccgagtgctaagccaccgccacagagatggctataacacagcggacattgaatatcttgaagatgaaaaggtggagggtccagagtatgaagaacttgccgctctccacgattctgtgcatcaacagtctgtttcctggttcgcgtctctccaggatcgcatgaaagaacaaattttaagtcattttggggtaatgccagacagagaacctgagcctcagagtaatcccagcggccctgcctggtcctggtggatcctggccgtgctgcccctggagcgcaaggctcagctggccatcctcggcatgacctcgctcaaagagcggctccttgccatccgacggatattagtcatcatcacgcgtaagatgaatagtcggcaagagctggctaatgccagggagagaaataattgatttttctctctgtcaaggtttctggcagcccttgtgcttttataaatgtcaggcatggacgaatagccgtccattcattgtgcttcatcaagtgcttgtggatgaggttccaaaatgggacgcttgccaaacattgagtcctcctcaaaaatgacaattctgtgtctggtgggatctgaccttgtgtgaggttagcctgaagtctgaatggagcccatagttggaaaacaacctaagaaaatctcttagaagcaggtgcttggggaatgcagttcactgacagcacaggaccctgcagatggtttacatgtggtttgggtttcacgagaaagaaggattcacttcccagtcagcatctggctctgccagatggtaaaggcgtgctttagtgtgtagacaatatgggggaaccacgtttttatctggaagtggatttcttagaacacaggctaaccaaaactacgcttaggctttgcgtgttgctgtgaagttgtctgtgaaatcgaataatcacaccattgttcagtgcaggagcccaaactagtccttacccaagaagtagtagcctctggatagaactgtgtttaatgtcctgttgtagtcccaggtgttgtaaattgcatgttgtaatcaaacgaatgtcaaaacataagaaagtataccttggatatagaaaaacctgagaacagtatcattcacttgaggatatatatatatatatttacacacaataaagtgagttaaaattgtatatgcattgggatgtcaaacataaaaccaccaagtgcaaagaatgctttgaaagtagaaccttgtctcattgatcagtggttactaagcatttaggaaacagtcatctttttctattgggatttgcattagaaattagccccatcagtaaatttcagtttactatccatttattaatatacaaaaacattaaaaaatctgccatgccatggtaatctatctattccaggaaaatagatcagaatatatgaagggaggatggccggtatgggatgtaaatattcagtaagtttttctccaacaccaacctaaaattatctttatttttttgaaagaaagttttacggtgatcagaccaggtgttatctgttaaaggacagtagtatgacttccatcctgtaatgcacgttggtgatattgattggaataactgaatctgagatactcatatgttctctctggcccaaccagctggtgcatttggttggcttcctcgtctgtaaggtggacattcttaaccagagggtcacgaccacatcacagctgcaagttttgctttgttcattgaaggtgattttttagttttaaaatatatatatctcataatatacaatgttgatggtatatcaatccatcaagcattttattagaaagactttataatattattaatttttctttagttttcagtagataaagtagtttcagtagataaagactttataatattattaatttttcttttagttttcagtctcatcatgggagttagaaaataccagcatcacttaattgtaaagagaaaatgtgaaagtattttccaatccaatgtttcaagtgcctcacttattgtgaatctcaaatatcatcttgagatggtttaatggcagtttggccaagtgatttctaagagattttattaatttatgcattaacaatagtattcaactttcttaggcattataacctaacccgatcatttgattggaataactgaatcattcattgattggaataaaataaagaaaacaaaatgcatctcacatgccagaagacctttaccagaagtggttcatgaaaatcagtatgcattgaccattctctgcctttcccttttggaaaatttttttgtaccttcatatcacagctgaatagttatcaatgccatttccatttggaagtatctaaataaccacaatgtgatcacagcttctccacgagccttcctgaagtaaagctggtatgcttgctataatacttggaacctgttgctttctcttcctcactctttaaatgtcataaggtcacacagttcttggaatcagaactattcagttatttcttcatgattctgcctggctttctgagtcttctccttcggcatgttatgtaaaagtctgaacaacaatgatgacgcagacgagagcaacatacgtttttattttttgataggtttttatttttttgataccagagggaattaactatgatcacatcgtgctctctctgttcagcatcacacgcccacatactgcagtgtgggagtagattggtacttactgagcacttagaaacatcacgcatcaggaaccgggtcagggtgacagcatcctacggtcatatcatgaaggaagcctcccttacaaacctaaaaaaaaaaaaccccagcttcagtttgctaccaattaagctaaagcagaacggtctgcttcctcctccgcctgcccccttctgcctcttttctgttggggagatgccaattctaaggatttctcagaaaataatgtaatctctcattcaatgtcaggacattccagcttaattgtactgaaagtgctccaataggcatgctctcgttacattggaatcaaagcagaaaagagtaatagcagcgtgggggagtcatttttcttcttgaggaacaatacatgctgttctgtatttttccattcatcgcccaaacctgcctgtgtctttgaaatgcaagtaagatcccaaaggcagctttctgaaagcccgtggcatttttagcttatcccatcccccgtgtgtgtcctcatcttcagaattgaaagttaggatactttttaaagtttcaaaagaaaataatttaaaatgttaaggtttatccatagaaacacaataattcttaaccaattcatgtaccaaattcaacagtattatctcatttttagggtcacaaatgtgtcctttttgcacttaaacctcctccctctctcaaaaacaaaaacaaacaaacaaacaaaaaacacaccaagactgtttaacaaattgtatctcaactcttaatatatgttaagtcttaccacaggacatttgaatcatcaaggaacagttgaagtttatggatggtagaataacaatgaactatgatattatcactttattataaactttttggaaaattggcagttgctaccatcgaaatactccattgcctgtgttacatagaatttgttataatttttaagggctttaaaaaaatacccatctgtttcttctccttcttgttttcttttgtgccccaccacttaaattacttgggtaaataccactcttcaaaatttgaatactgtctatcaaataagaagaagtgtgaaagatatgaagaagaaaggtgatagcaaattagaagaaaataaatgtgggtgatttcttttagttgaaagcacagagttttatttttccccagtataactattgagtagggtagggaggtccctgtatccccatttttattttttttgagatggggtctcactctgtcacccaggctggagtgcaatggcgcaatctcgtctcaccacaacctccgcctcctgggttcaagtgattctcttgccttggccccctgagtagctgggattacaggcacgcgccaccacacccagctaatttttgtattttttttttttagtagagatggggtttcaccatgttggtcaggctggtctcgaactcctgaccccatgatctgcccgcctcggcctcccacagtgctgggattacaggcgtgagccaccgtgcccggcccatctccccatgttttagcatagacagcagcggcattcagtggaaggagttcttccccttcaacatcgtccttcccaaaggccacattctgattctattgttcaccaaaaactaattcccagggaagcccgctctggatgggaaggatgagctgcgtgagccatcgcccacacagggagataaccgaacccctttgccagcatcaccccctctctactggggtgagacacttcattcagagcactggctctgactcccaggggaaagtctttttccctttacaactcctcacctcagcctcaccttgactttcacttctcaactgctgaattctataaaatagccttttagcagtgactcagcttttaggtgagcacagataatgaagaaattgaagtgccaccattgcactcccccaagttggggacataaactcgaatttgcacccaggtctgataaaagtaactgattgaggacgcagaaaggtggatgccattgacagcgttgactgttctcacaattcctacagaaatgaaagaaggagaggcccagcagaccacaccgggccatgaggggaagcatgggagacaggcagaagcaggagtgaggaggaacgtggctcagaccctctactgtatgttctgcaggaaagggcagggaaatagctaagactggctggtctgaataacagctcagactctaggctatacaggtggtctctagccatctggcacctagccccgggtcgttagggtgggggatattgcttcctaggttgtaagagccagatagaggaggatgggctctggattggtcactttgctcccagggtagccctttgctgtatctaagaattggctcaccctgggatgggcagtttctcctgggtcagcgaggcccctgagatgtcaaaatatcataaaatatagaaatcatgattaatacaattggtcctctgctgttttgacatactaaggtcacttttgatagcagaaacttttaaagagtagggcatacgttgccctgaagagcatagaaaacattttattctgagagtagaaaggaggaagacacgtggagatacaggagtcccttaggctggcccatagctgagtctctcatgtgtgtggcattagtcaagaatgtagttctgcagtttgcggggggggggtctctaacatttcttggtgcagttgttaacatgtgttaaacatatgagtctgatgatgatatcgcggtgtttctcggctcggggtggcaggtctggcggttgtgtggctgggggtgtgcactgatagttcagtaaaggataagtagagactcgtggtgttcatgtgtcaccacagggagggagtggctgtggagacccaggacaggaagtcgcggtggaaagcaggctggggtggtaggagaaggcaccgggggtgggtgctcctcccccaggggttgaggagttgactgatagggggcagttacctcctgggaaagcaagacgctcccttaagttttagaatggtacagagagtagtcccttctaccagagtttccatttagacatgggagtgtagggggccatgtttcggcagaagcagggcatgtatcagcattagtggactcctcagtattaaaaggaagaacagcaaacatgtcatgtgcccactttgtgcctcaggagaggtagcccgtggacatcgctagggcagaggttttaatatctgggacaaagttatctcccacggcgaggtcgtggctgggaccatgtcatcttcagccgtgagctgctgggctgggcaatgtcttctgggatgtgagacgtggggtctcctttctaagcggacccccactcgtgctgatgtgggtcccagcatttgccgcgtttggttgaaacagtggcttacctggagggtctgggtctctggatcataaaccagcgaaagcccccacatcagtggtgacaagatcaatagaccccagaatgtgtgcagctgtgcttgatagggttttggttcttgctttttggtggaagtttaggctcaagtgggtcccgtatcggatgagcagctgcacggcctgtgggagccctggggttagtgggtccaggagagaatgtgttctctctctgggctccagccctgatggggtggggataagatgcaagatttataggaatagggggaaacattatggaaggccccaatatgtaatgagcttttatatacaagaatgcaagacatagccctctttttatgtttaaaggggactatggtaatgttttttaaagtttgtgtgaggtgtgagtcaaccgaaaggccctaaattaagagagattcaggtttgtggtgcaagatagaggcccatttcggggtctgtttgcagaccagaatttgaaatggagttgtttgaggagaccattgtgtgtcttcgtgaaaccgattgtgtggaacctatcagggctgtggaagttgtagcgaatgccttttcccagagcccagcattgtggattccgagaagtggcatgtgtgtctcagtgacttccagtgatgcctgccactctgaagagatgaaggagtgtcctggcaagacctggaatcccagctgtagcacctgtggagagatgtgatttagatttggatttggggtatctgtgaggaagagtcccagagtttttcatcctgaagggggcaactcttgggcagtggtccaacagttggccataaatgtgaagctggggcgctgtgctgaccagggcatccagcgttaagacgactgcctaactttggccacatgcgttgttttttgggttccgtttcgtatcagggcatgctggctaaaagatgggaagcagcaacattctcttgggctccatcatttatatgagggttggcaatgccatctgtaccctctgtgaactcccactgctgttcactcagttaatctaagggacaccaaggggtctgcgggaggatgacctcacaagggactgaggacatgggagaccaccctcctgtgggtagaatacaccagagggcccaggcttgactctgtcctgtgttaaggaggcatcggtagttttgctgagcttgtcaggtgtttataatggacagttggagattggggtcctaggcttaggtctttgagagcctctgtgtccaggagagcccagtaggcatccagccatttactgctttaatagggtagcatgaggctgagagggatagtttcttgcatccaaagcccttaggcaccttatgtccatcctaagtgggccagagactccagggctgcatagagcttgccagagcttctataatgaaggggtctctgagggcaccaacaggagtgcccatggattttaaggtttgattatagaggttgtttatggagggtgccccatttaaagcaagctgatttgtaagcagcagcaagaagattaagtaaaatttgtaaatgaggactacattgccatcagaacctcgaaagtatctaaagatgttggacttgtatgtccttaatgagtgtgacaatgagtttcctcatttgtgctcctggagaaggcggatgtggtgaagaccctgtctgcagacattgtgtgccatggcaaagccgtggagctccctgtgggtggcctgcaaaggtgtatgtgcccctcagggcagaaggcaaacggcagccaagaagctgtgcaagtagacacttaatgggacatgttagccaaatctgtaagagcaaaatattggccagttatttattgtgtagaattaataattttaataataatggaaattgggtaatggatgggactgcagcaataaggttgtagtaatccaccatgaggcacacttgtttttttccaggtttaaggataggaaagattgggctgttcaatggagaaacaagggtataatcacccctttattaattagtaagttttaatccttgaatacctcatattaactgttttaactggaggtccatggggcatcattttatcaagctagtttataactgccaaagactgactttaattttaatttattatttgttttattagagtgtctgtgttcaatatgggatattagggcgttgggtactatgaccacaggaaatttagacaggctacagttaaagtgaagcataccttacccatccaccccccattttatatttagttgcctttttaaaaagattataggggtacaatgtttagatttagtgggatctccaggtataactgtaatttgagccccagtgttaagactatgaagctttgtcaatgggtacattttagcaaatgttacaattaatttagaacctaagttatggagacacaaaagccaataggcacccttttatgttttggttaaatgtttcagtatatacatcttatttatttgtaatattagtatataatttgttgtatacatttttagtgtataagcgttggatttctaattggatcagattagggaccttccgtttagctgcatatgtacatatacatgtacaatttattatatatttgcgttaaaatagcctatctgcatgtgtatatatgtgtgtatgtgtatgtatatgcactcacacgcataaatacacagtctatttagttacctttaatgttttttcccttgtacctaggctttttctcgctttttcctttttttctgattttgtggcaatttagttggaaggaggcggtcccagcatgttgacaggcagggtgttcagagtgcccaggcacactggtggggggtggttacaggctcacgtagctcaggggcttctgcaggtctcaggggagtgggaacaaagtgtcccaccccttccccttttcctcaaacctcaagccactggtctctatggatagatcctttgcatcccaccggattgaggaatgagtcacaacagctgcaaggctcttaaagcaacatttaaaccttttggcggctgtcatttctgtgaggagggtgcctctcaccggccgcatggccggaggatccctgcagcgctttggagaccaacacccagatcctttgcccaggagtgcgattaattcctcactggatgctgggggagggcccctcaggtgagcagcccaccactgacttcagcgttgctggctcggttatcagactctcatccaacacaagctcacagggaaagccgttccttgctccttgtggagggagctaccgtcattgccctgagaccaccagccaagaaagtaggtatgtccaggtagggaattcagagggacccagtgcatccaattatacaattatacccagaaggtcctgtgtaggggactgcgattgacatcaccctagtctgcagcaccaaggactgaatgagctcagtcctcttataatttaggctggactgtcacagacactggcagacacagcatacgtggtgcagccaaagtgcaaacatgccagcagcggccatgctccccagggtgggggtccagttagtaagccacgcgcagccaagaggcgaggcatgccctgtgccacacacggactcaccctgctcactgtgcccgtggtatcgaaatgtacccacgtttaattcataaaggagaggctgctgtcattgaaagaaaagtttgttacttgcatttctggagaaaaggagcgcaccaggccacgcagggccacaggaggaggacgcaccagagtggtcaggaggcagaactaggcgagcagctttccactgtgtctccatggcaaaggcgaagatgggcgggggcagagtgtaggattggcaggtttgaatgtcttgggcagtagctacaggggtggtctccagctgcctggtgcctggccctgggtgatcagggtgaggggatactgccttctgcagtggaagagtcaaatcgaggagatggactctgagttggttagtgtgcaaaggtgcactcccaagggacccctttgctatctctaagaattggcctgccctgggaagggcagtctctccccagtcagtgaggtccccaagatgtgaaaacattatacattataaaaaagcatgattaatataagctcattctagcatttcaggttacagcttctagaagaggtttgtagtctcaaatgagtaggtttttcctctagagaggggcgggcctggaccttcaagcaccccttggtgtgtttaggagctcaggagcagaagcacctgcctgcagccctgcagctaaggaagttctctcagtcactcagagcagggaggggctgagagagtcatgtgaggctcccggggtactacgacagccctcgaggtgaaggattggccctgatcataatagagaaccctgaggaagtttactgtcatgagtctcggctggttggcgcatgtgacctttgaaggatgaagatggagtttgcaacatgagtatctctaaccttttgcttttcagggatcattttcaaaaattgcattggggccttcgttatttaccatagtattttcactttcatagttttgtcacctttttgtactgtgaacagttcaaccagtgaccgacttctctctcatgctgtttaccccacacacaatttcccactcaattctgaaaataagaacctgttaataggttggaaagctgtgtactctattcatatattgttctttcatgctagtggagagtggtgtcattagcatcttaattttagagttgtgaaatgattttaccaattaggaattgaatgtgtattttttttctgtttaataagaagagcaaatttgaataaataagctggtgtagataaacttaataatcatgctttttcttgtttggagataggtgatgtgttgtcatatcctgtgatacaggtcactcatctggccttctgtttctgaagtttaagtctggtttgaatatgtaataatactactcagcatttcttgttgcctaagtgagacgaaacttaaatgttatgatatttacttcatgtattcttgtactgttcatttcaattaattggtattgtatatctaatatgtgatatttgaactgaataaaacttacagtgttgtaaatgttctttaataaataatcacacctaagtaataggctagactgatgagaaattagatcaaatcagtgcctaggcctttgtgtttgtgtcgtagggatgtactaacacatcaccacagactgacggcttttcacaataaatcagttttcttcgctcaaaaaaaaa

SEQ ID NO: 149 - DNA, 3071 bp, Homo sapiens
gtgcagggcagtcagaccaggaccatggaactcagcgtcctcctcttccttgcactcctcacaggactcttgctactcctggttcagcgccaccctaacacccatgaccgcctcccaccagggccccgccctctgccccttttgggaaaccttctgcagatggatagaagaggcctactcaaatcctttctgaggttccgagagaaatatggggacgtcttcacggtacacctgggaccgaggcccgtggtcatgctgtgtggagtagaggccatacgggaggcccttgtggacaaggctgaggccttctctggccggggaaaaatcgccatggtcgacccattcttccggggatatggtgtgatctttgccaatggaaaccgctggaaggtgcttcggcgattctctgtgaccactatgagggacttcgggatgggaaagcggagtgtggaggagcggattcaggaggaggctcagtgtctgatagaggagcttcggaaatccaagggggccctcatggaccccaccttcctcttccagtccattaccgccaacatcatctgctccatcgtctttggaaaacgattccactaccaagatcaagagttcctgaagatgctgaacttgttctaccagactttttcactcatcagctctgtattcggccagctgtttgagctcttctctggcttcttgaaatactttcctggggcacacaggcaagtttacaaaaacctgcaggaaatcaatgcttacattggccacagtgtggagaagcaccgtgaaaccctggaccccagcgcccccaaggacctcatcgacacctacctgctccacatggaaaaagagaaatccaacgcacacagtgaattcagccaccagaacctcaacctcaacacgctctcgctcttctttgctggcactgagaccaccagcaccactctccgctacggcttcctgctcatgctcaaataccctcatgttgcagagagagtctacagggagattgaacaggtgattggcccacatcgccctccagagcttcatgaccgagccaaaatgccatacacagaggcagtcatctatgagattcagagattttccgaccttctccccatgggtgtgccccacattgtcacccaacacaccagcttccgagggtacatcatccccaaggacacagaagtatttctcatcctgagcactgctctccatgacccacactactttgaaaaaccagacgccttcaatcctgaccactttctggatgccaatggggcactgaaaaagactgaagcttttatccccttctccttagggaagcggatttgtcttggtgaaggcatcgcccgtgcggaattgttcctcttcttcaccaccatcctccagaacttctccatggccagccccgtggccccagaagacatcgatctgacaccccaggagtgtggtgtgggcaaaatacccccaacataccagatccgcttcctgccccgctgaaggggctgagggaagggggtcaaaggattccagggtcattcagtgtccccgcctctgtagacaatggctctgactccccgcaacttcctgcctctgagagacctgctacaagccagcttccttcccctccatggcaccagttgtctgaggtcacattgcaagtgagtgcaggagtgagattatcgaaaattataatatacaaaatcatatatatatatatgttcttgttttttgagacagagtctcacactgttgcccaggctggagtgcagtggcgtgatctcggctcactgcaacctccacccccggggatcaagcaactctcctgcctcagcctccctagtagctgggattacaggcatgcactaccacgcttggctaatttttgtatttttagtagagatggggtttcactgtgtaggccaggctggtctcgaactcctgaactcaagtgattcacccaccttagcctcccaaagtgctgggattacaggcgtgagtcaccgtgcccagccatgtatatatataattttaaaaattaagctgaaattcacataacataaaattagctgttttaaagtgtaaaatttagtggcgtgtggttcattcacaaagctgtacaaccaccaccatctagttccaaacattttctttttttctgagatggagtctcactctgtcacccaggttcgagttcagtggtgccatctctgtccactgcaacctccacatcctgggttcaagtgattctcctgcctcagcctctggaggagctggtatcacaggcgtcccccaccacgcctggctaaattttgtatttttaggtggtcttgaactcctgatgtcaggtgattctcctagctccaaatgttttcattatctctcccccaacaaaacccatacctatcaagctgtcactccccataccccattctctttttcatctcggcccctgtcaatctggtttttgtcactatggacttaccaattctgaatatttcccataaacagaatcatacaatatttgattttttttttttttttgaaactaagccttgctctgtctcccaggctggagtgctatggtgcaatttttgttcactgcaacctctgccttccaagatcaagagattctccagtctcagctcccaagtagctgggattacaggcatgtactaccatgcctggctaattttcttgtagttttagtagggacatgttggccaggctggtggtgagctcctggcctcaggtgatccacccacctcagtgttccaaagtgctgatattacaggcataatatgtgatcttttgtgtctggttgctttcatgttgaatgctatttttgaggttcatgcctgttgtagaccacagtcacacactgctgtagtcttccccagtcctcattcccagctgcctcttcctactgcttccgtctatcaaaaagcccccttggcccaggttccctgagctgtgggattctgcactggtgctttggattccctgatatgttccttcaaatctgctgagaattaaataaacatctctaaagcctgacctccccacgtcaa

SEQ ID NO: 150 - DNA, 4579 bp, Homo sapiens
agtccgaccctcggtcccgccgtgtgagcagctggtggagtggagctcagcgcggacgccggagctgcggccgccccctctgcaggtgcctgtgaggaggcgcccgggccgcaaccgctttccgagatccccagtcgcgcactcgctccccgcgctcctgaggggccgcccggccggaggaggccgtcgcggggctcggcgttcagcatgaaccgcagccaccggcacggggcgggcagcggctgcctgggcactatggaggtgaagagcaagtttggagctgaatttcgtcggttttcgctggaaagatcaaaacctggaaaatttgaggagttttatggattactacaacatgttcataagatccccaatgttgacgttttggtaggctatgcagacatccatggagacttactacctataaataatgatgataattatcacaaagctgtttcaacggccaatccactgcttaggatatttatacaaaagaaggaagaagcagactacagtgcctttggtacagacacgctaataaagaagaagaatgttttaaccaacgtattgcgtcctgacaaccatagaaaaaagccacatatagtcattagtatgccccaagactttagacctgtgtcttctattatagacgtggatattctcccagaaacgcatcgtagggtacgtctttacaaatacggcacggagaaacccctaggattctacatccgggatggctccagtgtcagggtaacaccacatggcttagaaaaggttccagggatctttatatccaggcttgtcccaggaggtctggctcaaagtacaggactattagctgttaatgatgaagttttagaagttaatggcatagaagtttcagggaagagccttgatcaagtaacagacatgatgattgcaaatagccgtaacctcatcataacagtgagaccggcaaaccagaggaataatgttgtgaggaacagtcggacttctggcagttccggtcagtctactgataacagccttcttggctacccacagcagattgaaccaagctttgagccagaggatgaagacagcgaagaagatgacattatcattgaagacaatggagtgccacagcagattccaaaagctgttcctaatactgagagcctggagtcattaacacagatagagctaagctttgagtctggacagaatggctttattccctctaatgaagtgagcttagcagccatagcaagcagctcaaacacggaatttgaaacacatgctccagatcaaaaactcttagaagaagatggaacaatcataacattatgaaaccgtggtttgaatgttttcagagtgaggatgccatgaggacttgtacatttggctagtttaaaagcatatatacctctgaccagtgacgtggaataggcatgagacgagtaacgttgcaagcttacaatattattaaagtagtagtttgataattgttaatataaactttggtggatcagaggtgaatttaagtccaaaacaaaggggcctttgctgatgaagttacgtgcttttgctgttttgtctgtggagaatcagatgttaaagcacattcttggaactatgtgagaagactagatcatttctgttggaagtggttgcatatttaacctgctgtgcagagcccagttaatttttcctttaactgtatttttaaaattctaatgtgaagtctgattctctcttgtggtacattggggacctcagctcttaaaggtctcatgttcccaatattttattttgattttttttttttttttttttttttttttttttagtgactgggtctcactctgttgcccacactggaatgcagtggcatgatcacagctctctgcagcctcaatcccctgggctcaagcagtcctcccacctcagcctcctgagtagctgggaccataggcacataccaccacatctgtctactttttgtattttttgtagagacagggtttcgccatgttgcccaagttggtcttgaactcctgggcttaagcagtcctgcctcggcttcccaaaatgctaggattagagccaccatgcccagcctattttgatttttgtttttttatgttcctttctaataaattgtaacaaatgatgttctcaagtacatttccagtttcttttcttttctttctttttttttttttttttttttttgagatggagtctcgctctatcgcccaggctggagtgcagtggcgcgatcttggctcactgcaagctctacctcctgggttcacaccattctcctgcctcagcctcccaagtagctgggactacaggcgcctgccaccatgcctggctaatttttagtagagacggggtttcgcagtgttagccaggaaggtctcaatctcctgacctcctgatccgcccgcctcggcctcccaaagtgctgggattacaggcgtgagccaccgcgcccagttgtgcatttctggtttctaagaatcaaaccacttggctgtttttaggagttacttcccatgttataaagctgaggaagctttttttttttttttttgagacagagtctctgtcacccaggctggagtgcagtggtgcaatctcagctcccgggttcaagcaattctcctgcctcagccttctgagtagctaagattacaggtgtgcgccaacacgtctggcttatttttttgtatttttagtagagatggagtttcaccatgttggtcaggtgggtctcaaactcctgacctcaagtgatccgcccatctcctcccaaagtgctggattgcaggcatgagcgcctagccaggaagctatcttttcttgagttatgaaactttgcaacagttgttcaaattggtgtttgtccttcctatagctttcatattttcaaattaattctgtatggctatataatttatgttttaaaaggcaattctcttgactttggaaatatggaagtctctcctttaacctattcttgttcccattcccagtctcatttgaaatcattccttttattgttagtgtgtgtatttttgttggtgtgcttttaatgcatccaagtatgcatcattttggataaaaaatacatccaaattaagatgttttaacacataggacaaacttgtgcactttttatgccaaaaaaaaaaaaaattgggttttccttcatgggatttctagaaacactgcctacactttatgaaaactacatagtattcacctgtgacaggtagagtttatcactattaattttatgaggctatttattactttccaatgcatccacttagaacaagctaagagtaaggctgctaactttaattccttgcctgattttattgtacagtgtgcacaagcacaatggtatgcttgtatatagaaactaaaaatactatgaagtacataagttccctatggcttatggagagttatttattaattaactttatggtagggctagtatgaatacctttttaacaattgtgtgctattacaacaatgaagattcaaatgactccgctttgaaggatgttttctctatatggtaaaatatatatgaagaagtcttgattacgtgaagatcacttgactcagaatacttcaatgtattttgttcacattaccactaagcatattatcagtaaactattaactgactgcacattatgtaatacgttgtactttttgttgaattcaccgaagttcttccatttatatgctatttttaatggcattccggctttaacattctgtgagtcttacaaatttgactcttgaatggcaaaataatgttagtatgtagaaggttaactttcatttataatataagtggtgcaggggttcaacattttaagtaaaaatatttttacacactacctctctctttttttttttaaagttttaacatcagaacttttgggggaaaaactacttcagggcttgactttttgtacaaattttaactgtaaaatacagatttatcttgtacgcattcatggaaatggaaatcaaagctgctattgctttttattttaattatcctgttaagggtatctatcaatggtattttcaagtagatctctgtttcttaaattattggtgaaataattgattactagatatattgtaaaaccaatagatcctggttatacgataaaatatcagctcattggtaggctgaatcaattatttcaagtgcaccttattaacaaaagtatcagtggatccaacataaaattttatagtactaaatgtcaagcctaactgtgaattttgttctgtatcttaagtaaatttatgataatgttctcgagctatcaacaaaatatatgtacttttgtgagctatgaattttctaattaaattttacatgctataacatgatttttacatgaatgatactttgtttataactatcaaatgtcagtattttactacaattttattataaagtgtacattatcactaaatgaacttcgattttaaaaatcaaattagctttagttgtatattattttttacaaataaagatagacttgtataaaggcta

SEQ ID NO: 151 - DNA, 5554 bp, Homo sapiens
ctcctcctcccgctcctcccgccgccgtgggccgggagccgggctgcagagtgccaggccgggcgtctgcggccgcgggctctcgcggggcggcgacgccgcggggaggatgctgcttgccgcgcccgcgtcctcaccgtcctcccgggccgcctgctggggctttgttgtggcccggacgccgcgggccaccccctgaagtcgcctgccgccgccgccgccgcacctagcggacgggcgggcgggcgcgcgtgtgcccaggagtgcgcgcctgtcgcggtggtgggtgcaggactggacccacgggcccattgtgcgcccgcccgcggcagccaggaccatgtgggtgaacccggaggaggtgttgctggccaacgcgctgtggatcaccgagagggccaacccatacttcatcctgcagcggaggaagggccacgccggcgatggaggcggcggcggcggactggcgggcctgctggtgggtacccttgatgttgtgttggactccagcgcccgggtcgctccttaccgaatcttgtaccagactccagactccctggtctactggaccatcgcctgtggtggttccaggaaagaaatcactgaacactgggaatggcttgagcaaaatctcttgcagacactctccatctttgaaaatgagaatgatatcaccacatttgtgagaggaaaaatacagggcatcattgcagaatacaacaaaatcaatgatgtaaaggaagatgatgacacggagaagtttaaagaagccattgtgaaatttcataggctgtttgggatgccagaggaagagaaactcgtcaactattactcttgcagctattggaaggggaaggtcccccgtcagggttggatgtacctcagcattaaccacctttgcttttattcttttcttatgggaagggaagcgaaactggtcatccggtgggtagacatcactcagcttgagaagaatgccaccctgcttctgcctgatgtgatcaaagtgagcacacggtccagtgagcatttcttctctgtattcctcaacatcaacgagaccttcaagttaatggagcagcttgccaacatagccatgaggcaactcttagacaatgagggatttgaacaagatcgatccctgcccaaactcaaaaggaaatctcctaaaaaagtgtctgctctaaaacgtgatcttgatgccagggcaaagagtgagagataccgtgcacttttccggctgcccaaagatgaaaaattagatggccacacagactgcactctctggactccatttaacaaaatgcacattttggggcagatgtttgtgtccacaaattacatctgttttaccagcaaggaggagaacttatgtagcctcattatcccgctccgtgaggtgacaattgtggaaaaggcagacagctccagtgtgctccccagtcccttatccatcagcacccgaaacaggatgaccttcctatttgccaacttgaaagatagagactttctagtgcagaggatctcagatttcctgcaacagactacttccaaaatatattctgacaaggagtttgcaggaagttacaacagttcagatgatgaggtgtactctcgacccagcagcctcgtctcctccagcccccagagaagcacgagctctgatgctgatggagagcgccagtttaacctaaatggcaacagcgtccccacagccacacagaccctgatgaccatgtatcggcggcggtctcccgaggagttcaacccgaaattggccaaagagtttctgaaagagcaagcctggaagattcactttgctgagtatgggcaagggatctgcatgtaccgcacagagaaaacgcgggagctggtgttgaagggcatcccggagagcatgcgtggggagctctggctgctgctgtcaggtgccatcaatgagaaggccacacatcctgggtactatgaagacctagtggagaagtccatggggaagtataatctcgccacggaggagattgagagggatttacaccgctcccttccagaacacccagcttttcagaatgaaatgggcattgctgcactaaggagagtcttaacagcttatgcttttcgaaatcccaacatagggtattgccaggccatgaatattgtcacttcagtgctgctgctttatgccaaagaggaggaagctttctggctgcttgtggctttgtgtgagcgcatgctcccagattactacaacaccagagttgtgggtgcactggtggaccaaggtgtctttgaggagctagcacgagactacgtcccacagctgtacgactgcatgcaagacctgggcgtgatttccaccatctccctgtcttggttcctcacactatttctcagtgtgatgccttttgagagtgcagttgtggttgttgactgtttcttctatgaaggaattaaagtgatattccagttggccctagctgtgctggatgcaaatgtggacaaactgttgaactgcaaggatgatggggaggccatgaccgttttgggaaggtatttagacagtgtgaccaataaagacagcacactgcctcccattcctcacctccactccttgctcagcgatgatgtggaaccttaccctgaggtagacatctttagactcatcagaacttcctacgagaaattcggaactatccgggcagatttgattgaacagatgagattcaaacagagactgaaagtgatccagacgctggaggatactacgaaacgcaacgtggtacgaaccattgtgacagaaacttcctttaccattgatgagctggaagaactttatgctcttttcaaggcagaacatctcaccagctgctactggggcgggagcagcaacgcgctggaccggcatgaccccagcctgccctacctggaacagtatcgcattgacttcgagcagttcaagggaatgtttgctcttctctttccttgggcatgtggaactcactctgacgttctggcctcccgcttgttccagttattagatgaaaatggagactctttgattaacttccgggagtttgtctctgggctaagtgctgcatgccatggggacctcacagagaagctcaaactcctgtacaaaatgcacgtcttgcctgagccatcctctgatcaagatgaaccagattctgcttttgaagcaactcagtacttctttgaagatattaccccagaatgtacacatgttgttggattggatagcagaagcaaacagggtgcagatgatggctttgttacggtgagcctaaagccagacaaagggaagagagcaaattcccaagaaaatcgtaattatttgagactgtggactccagaaaataaatctaagtcaaagaatgcaaaggatttacccaaattaaatcaggggcagttcattgaactgtgtaagacaatgtataacatgttcagcgaagaccccaatgagcaggagctgtaccacgccacggcagcagtgaccagcctcctgctggagattggggaggtcggcaagttgttcgtggcccagcctgcaaaggagggcgggagcggaggcagtgggccgtcctgccaccagggcatcccaggcgtgctcttccccaagaaagggccaggccagccttacgtggtggagtctgttgagcccctgccggccagcctggcccccgacagcgaggaacactcccttggaggacaaatggaggacatcaagctggaggactcctcgccccgggacaacggggcctgctcctccatgctgatctctgacgacgacaccaaggacgacagctccatgtcctcatactcggtgctgagtgccggctcccacgaggaggacaagctgcactgcgaggacatcggagaggacacggtcctggtgcggagcggccagggcacggcggcactgccccggagcaccagcctggaccgggactgggccatcaccttcgagcagttcctggcctccctcttaactgagcctgccctggtcaagtactttgacaagcccgtgtgcatgatggccaggattaccagtgcaaaaaacatccggatgatgggcaagcccctcacctcggccagtgactatgaaatctcggccatgtccggctgacacgggcgccttcccgggggagtgggaggagagggaggggagggattttttatgttcttctgtgttgagttttttctttctttcttttaaattaaatatttattagtacctggcttgaagcctagtgttttcataatgtaattcaatgaaaactgttggagaaatatttaaacacctcaatgtaggtacattacactcttgttgcggggaggggatttaccagaatacagtttatttcgtgaattctaaaaaacaaaaagatgaatctgtcagtgatatgtgtgtattataacttattaatcttgctgttgagctgtatacatggtttaaaaaatagtactgtttaatgctaagtaaggcagcagtcatttgtgtattcaggctttttaaataaaattagagctgtaaggaaaatgaaaagccacaaatgcaagactgttcttaaatggaaggcatagtcagcgagggtaaatcctataccactttaggaagtattaaaaatatttttaagatttgaaatatatttcatagaagtcctctattcaaaatcatattccacagatgttccccttcaaagggaaaacatttggggttctaaacagttatgaaagtaagtgatttttacatgattccagaataacacttgtattgaccaatttagacagataccagaccaattttgcatttaagaaattgttctgattatttacgtcaactcattagaattcagtgaaaagtaacagtcttttgtcacagagaatctgaaagtagcagcaaagacagagggctcatgacaggtttttgcttttgctttgcttttgtttttgaaagagtaaaagtactgatgcttctgatactggatgtttagcttcttactgcaaaaacataagtaaaacagtcaactttaccatttccgtattctccatagattgaagaaatttataccacatatcgcatatgaccatctttccatcaaatcaatgtagagataatgtaaactgaaaaaaaatctgcaagataatgtaactgaatgttttaaaaacagaacttgtcactttatataaaagaatagtatgctctatttcctgaatggatgtggaaatgaaagctagcgcacctgcactttgaattcttgcttcttttttattactgttatgattttgctttttacagatgttggacgattttttcttctgattgttgaattcataatcatggtctcatttcctttgcttctttggaatatttctttcaacacattcctttattttattatacattgtgtcctttttttagctattgctgctgttgttttttattctatttacaggatgatttttaaactgtcaaatgaagtagtgttaacctcaaataggctaaatgtgaacaaataaaatacagcaaatactcaga

SEQ ID NO: 152 - DNA, 6330 bp, Homo sapiens
aggagctggcggagggcgttcgtcctgggactgcacttgctcccgtcgggtcgcccggcttcaccggacccgcaggctcccggggcagggccggggccagagctcgcgtgtcggcgggacatgcgctgcgtcgcctctaacctcgggctgtgctctttttccaggtggcccgccggtttctgagccttctgccctgcggggacacggtctgcaccctgcccgcggccacggaccatgaccatgaccctccacaccaaagcatctgggatggccctactgcatcagatccaagggaacgagctggagcccctgaaccgtccgcagctcaagatccccctggagcggcccctgggcgaggtgtacctggacagcagcaagcccgccgtgtacaactaccccgagggcgccgcctacgagttcaacgccgcggccgccgccaacgcgcaggtctacggtcagaccggcctcccctacggccccgggtctgaggctgcggcgttcggctccaacggcctggggggtttccccccactcaacagcgtgtctccgagcccgctgatgctactgcacccgccgccgcagctgtcgcctttcctgcagccccacggccagcaggtgccctactacctggagaacgagcccagcggctacacggtgcgcgaggccggcccgccggcattctacaggccaaattcagataatcgacgccagggtggcagagaaagattggccagtaccaatgacaagggaagtatggctatggaatctgccaaggagactcgctactgtgcagtgtgcaatgactatgcttcaggctaccattatggagtctggtcctgtgagggctgcaaggccttcttcaagagaagtattcaaggacataacgactatatgtgtccagccaccaaccagtgcaccattgataaaaacaggaggaagagctgccaggcctgccggctccgcaaatgctacgaagtgggaatgatgaaaggtgggatacgaaaagaccgaagaggagggagaatgttgaaacacaagcgccagagagatgatggggagggcaggggtgaagtggggtctgctggagacatgagagctgccaacctttggccaagcccgctcatgatcaaacgctctaagaagaacagcctggccttgtccctgacggccgaccagatggtcagtgccttgttggatgctgagccccccatactctattccgagtatgatcctaccagacccttcagtgaagcttcgatgatgggcttactgaccaacctggcagacagggagctggttcacatgatcaactgggcgaagagggtgccaggctttgtggatttgaccctccatgatcaggtccaccttctagaatgtgcctggctagagatcctgatgattggtctcgtctggcgctccatggagcacccagggaagctactgtttgctcctaacttgctcttggacaggaaccagggaaaatgtgtagagggcatggtggagatcttcgacatgctgctggctacatcatctcggttccgcatgatgaatctgcagggagaggagtttgtgtgcctcaaatctattattttgcttaattctggagtgtacacatttctgtccagcaccctgaagtctctggaagagaaggaccatatccaccgagtcctggacaagatcacagacactttgatccacctgatggccaaggcaggcctgaccctgcagcagcagcaccagcggctggcccagctcctcctcatcctctcccacatcaggcacatgagtaacaaaggcatggagcatctgtacagcatgaagtgcaagaacgtggtgcccctctatgacctgctgctggagatgctggacgcccaccgcctacatgcgcccactagccgtggaggggcatccgtggaggagacggaccaaagccacttggccactgcgggctctacttcatcgcattccttgcaaaagtattacatcacgggggaggcagagggtttccctgccacggtctgagagctccctggctcccacacggttcagataatccctgctgcattttaccctcatcatgcaccactttagccaaattctgtctcctgcatacactccggcatgcatccaacaccaatggctttctagatgagtggccattcatttgcttgctcagttcttagtggcacatcttctgtcttctgttgggaacagccaaagggattccaaggctaaatctttgtaacagctctctttcccccttgctatgttactaagcgtgaggattcccgtagctcttcacagctgaactcagtctatgggttggggctcagataactctgtgcatttaagctacttgtagagacccaggcctggagagtagacattttgcctctgataagcactttttaaatggctctaagaataagccacagcaaagaatttaaagtggctcctttaattggtgacttggagaaagctaggtcaagggtttattatagcaccctcttgtattcctatggcaatgcatccttttatgaaagtggtacaccttaaagcttttatatgactgtagcagagtatctggtgattgtcaattcattccccctataggaatacaaggggcacacagggaaggcagatcccctagttggcaagactattttaacttgatacactgcagattcagatgtgctgaaagctctgcctctggctttccggtcatgggttccagttaattcatgcctcccatggacctatggagagcagcaagttgatcttagttaagtctccctatatgagggataagttcctgatttttgtttttatttttgtgttacaaaagaaagccctccctccctgaacttgcagtaaggtcagcttcaggacctgttccagtgggcactgtacttggatcttcccggcgtgtgtgtgccttacacaggggtgaactgttcactgtggtgatgcatgatgagggtaaatggtagttgaaaggagcaggggccctggtgttgcatttagccctggggcatggagctgaacagtacttgtgcaggattgttgtggctactagagaacaagagggaaagtagggcagaaactggatacagttctgaggcacagccagacttgctcagggtggccctgccacaggctgcagctacctaggaacattccttgcagaccccgcattgccctttgggggtgccctgggatccctggggtagtccagctcttcttcatttcccagcgtggccctggttggaagaagcagctgtcacagctgctgtagacagctgtgttcctacaattggcccagcaccctggggcacgggagaagggtggggaccgttgctgtcactactcaggctgactggggcctggtcagattacgtatgcccttggtggtttagagataatccaaaatcagggtttggtttggggaagaaaatcctcccccttcctcccccgccccgttccctaccgcctccactcctgccagctcatttccttcaatttcctttgacctataggctaaaaaagaaaggctcattccagccacagggcagccttccctgggcctttgcttctctagcacaattatgggttacttcctttttcttaacaaaaaagaatgtttgatttcctctgggtgaccttattgtctgtaattgaaaccctattgagaggtgatgtctgtgttagccaatgacccaggtgagctgctcgggcttctcttggtatgtcttgtttggaaaagtggatttcattcatttctgattgtccagttaagtgatcaccaaaggactgagaatctgggagggcaaaaaaaaaaaaaaagtttttatgtgcacttaaatttggggacaattttatgtatctgtgttaaggatatgtttaagaacataattcttttgttgctgtttgtttaagaagcaccttagtttgtttaagaagcaccttatatagtataatatatatttttttgaaattacattgcttgtttatcagacaattgaatgtagtaattctgttctggatttaatttgactgggttaacatgcaaaaaccaaggaaaaatatttagtttttttttttttttttgtatacttttcaagctaccttgtcatgtatacagtcatttatgcctaaagcctggtgattattcatttaaatgaagatcacatttcatatcaacttttgtatccacagtagacaaaatagcactaatccagatgcctattgttggatactgaatgacagacaatcttatgtagcaaagattatgcctgaaaaggaaaattattcagggcagctaattttgcttttaccaaaatatcagtagtaatatttttggacagtagctaatgggtcagtgggttctttttaatgtttatacttagattttcttttaaaaaaattaaaataaaacaaaaaaaaatttctaggactagacgatgtaataccagctaaagccaaacaattatacagtggaaggttttacattattcatccaatgtgtttctattcatgttaagatactactacatttgaagtgggcagagaacatcagatgattgaaatgttcgcccaggggtctccagcaactttggaaatctctttgtatttttacttgaagtgccactaatggacagcagatattttctggctgatgttggtattgggtgtaggaacatgatttaaaaaaaaactcttgcctctgctttcccccactctgaggcaagttaaaatgtaaaagatgtgatttatctggggggctcaggtatggtggggaagtggattcaggaatctggggaatggcaaatatattaagaagagtattgaaagtatttggaggaaaatggttaattctgggtgtgcaccagggttcagtagagtccacttctgccctggagaccacaaatcaactagctccatttacagccatttctaaaatggcagcttcagttctagagaagaaagaacaacatcagcagtaaagtccatggaatagctagtggtctgtgtttcttttcgccattgcctagcttgccgtaatgattctataatgccatcatgcagcaattatgagaggctaggtcatccaaagagaagaccctatcaatgtaggttgcaaaatctaacccctaaggaagtgcagtctttgatttgatttccctagtaaccttgcagatatgtttaaccaagccatagcccatgccttttgagggctgaacaaataagggacttactgataatttacttttgatcacattaaggtgttctcaccttgaaatcttatacactgaaatggccattgatttaggccactggcttagagtactccttcccctgcatgacactgattacaaatactttcctattcatactttccaattatgagatggactgtgggtactgggagtgatcactaacaccatagtaatgtctaatattcacaggcagatctgcttggggaagctagttatgtgaaaggcaaatagagtcatacagtagctcaaaaggcaaccataattctctttggtgcaggtcttgggagcgtgatctagattacactgcaccattcccaagttaatcccctgaaaacttactctcaactggagcaaatgaactttggtcccaaatatccatcttttcagtagcgttaattatgctctgtttccaactgcatttcctttccaattgaattaaagtgtggcctcgtttttagtcatttaaaattgttttctaagtaattgctgcctctattatggcacttcaattttgcactgtcttttgagattcaagaaaaatttctattcttttttttgcatccaattgtgcctgaacttttaaaatatgtaaatgctgccatgttccaaacccatcgtcagtgtgtgtgtttagagctgtgcaccctagaaacaacatattgtcccatgagcaggtgcctgagacacagacccctttgcattcacagagaggtcattggttatagagacttgaattaataagtgacattatgccagtttctgttctctcacaggtgataaacaatgctttttgtgcactacatactcttcagtgtagagctcttgttttatgggaaaaggctcaaatgccaaattgtgtttgatggattaatatgcccttttgccgatgcatactattactgatgtgactcggttttgtcgcagctttgctttgtttaatgaaacacacttgtaaacctcttttgcactttgaaaaagaatccagcgggatgctcgagcacctgtaaacaattttctcaacctatttgatgttcaaataaagaattaaactaaa

SEQ ID NO: 153 - DNA, 1799 bp, Homo sapiens
acttcctcatagaccttggatgtgggaggattgcattcagtctagttcctggttgccggctgaaataacctgaattcaagccaggaagaagcagcaatctgtcttctggattaaaactgaagatcaacctactttcaacttactaagaaaggggatcatggacattgaagcatatcttgaaagaattggctataagaagtctaggaacaaattggacttggaaacattaactgacattcttcaacaccagatccgagctgttccctttgagaaccttaacatccattgtggggatgccatggacttaggcttagaggccatttttgatcaagttgtgagaagaaatcggggtggatggtgtctccaggtcaatcatcttctgtactgggctctgaccactattggttttgagaccacgatgttgggagggtatgtttacagcactccagccaaaaaatacagcactggcatgattcaccttctcctgcaggtgaccattgatggcaggaactacattgtcgatgctgggtttggacgctcataccagatgtggcagcctctggagttaatttctgggaaggatcagcctcaggtgccttgtgtcttccgtttgacggaagagaatggattctggtatctagaccaaatcagaagggaacagtacattccaaatgaagaatttcttcattctgatctcctagaagacagcaaataccgaaaaatctactcctttactcttaagcctcgaacaattgaagattttgagtctatgaatacatacctgcagacatctccatcatctgtgtttactagtaaatcattttgttccttgcagaccccagatggggttcactgtttggtgggcttcaccctcacccataggagattcaattataaggacaatacagatctaatagagttcaagactctgagtgaggaagaaatagaaaaagtgctgaaaaatatatttaatatttccttgcagagaaagcttgtgcccaaacatggtgatagattttttactatttagaataaggagtaaaacaatcttgtctatttgtcatccagctcaccagttatcaactgacgacctatcatgtatcttctgtacccttaccttattttgaagaaaatcctagacatcaaatcatttcacctataaaaatgtcatcatatataattaaacagctttttaaagaaacataaccacaaaccttttcaaataataataataataataataaaaaatgtattttaaagatggcctgtggttatcttggaaattggtgatttatgctagaaagcttttaatgttggtttattgttgaattcctagaaaagttttattggtagatgagtaaataaaatattgtaaaaaaacttattgtctataaagtatattaaaacattgttggctaatataatttgaaaaaaagtggttttttggaagacttaggatattatggtgctacataatttttcctcgatgctctcttcctctcatctttcttgtctcttaaattactttacttccttgcacactttgccatacaagaatgaacatgagcttttcttgtgtagatctgagttgaaatcctgtggacactgggcgaattactttttagatctgtagctctgactcctcaggcataaaatgggaataatgcttttacagtttagtggcggaactaaactcccaaaattatttgttatatggatcaagtaataacgtcagtaatgtttttggtacaaagtcattatttaataaaagttattgttccatcttgcttgccccccca

SEQ ID NO: 154 - DNA, 1705 bp, Homo sapiens
aggactcgccgctgcccgcgccccgccgccgctgctgcccccagccccggccccaggcgtcccagccatggtccgcccaatgctcttgctcagcctcggcctcctggctggtctgctgccggcgctggccgcctgcccccagaactgccactgccacagcgacctgcagcacgtcatctgcgacaaggtggggctgcagaagatccccaaggtgtcagagaagaccaagctgctcaacctacagcgcaacaacttcccggtgctggctgccaattcgttccgggccatgccgaacctcgtgtcattgcacctgcagcactgccagatccgcgaggtggccgccggtgccttccgcggcctcaagcaacttatctacttgtacctgtcccataacgacatccgcgtgctgcgcgcaggtgccttcgacgacctgaccgagctgacctacctctacctggaccacaacaaggtcactgagctgccccgggggttgctctccccgctggtcaacctcttcatcttgcagctcaacaacaacaagatccgtgagctgcgcgcaggcgccttccagggagccaaggacctgcgctggctctacctgtcggaaaacgcgttgagctccctgcagcccggggccctggacgacgtggagaacctcgccaaattccacgtggacaggaaccagctgtccagctacccctcagctgccctgagcaagctacgggtggtggaggagctgaagctgtcccacaaccccctgaaaagcatcccggacaatgccttccagtcctttggcagatacctggagaccctctggctggacaacaccaacctggagaagttctcagatggtgccttcctgggtgtaaccacgctgaaacacgtccatttggagaacaaccgcttgaaccagctaccctccaacttccccttcgacagcctggagaccctcgcccttaccaataacccctggaagtgtacctgccagctccggggccttcggcggtggctggaagccaaggcctcccgcccagatgccacctgtgcctcacctgccaagttcaagggccagcacatccgtgacacggacgccttccgcagctgcaagttccccaccaagaggtccaagaaagctggccgccattaaacaggttctgacccagccagtcctggtgactggcctctgccttccaccggagagactactgaccttctcacctccacccataccttctccccacagcctctgctgatgcacagagctgcctacacctagacacgtcctggcagggggcctcgggcactccactaccaacccagctccacccagcagtgtcctggggagaaggaaggctgagcctctccccagccttcatgccttccccaccctccagctcctcttggagaagctgttgctgagaccccccccccaagtcaatcagaaccacaacaggttggtcatcaggatggccaccctcccaggatcatccttcctctgttcctctttccctgccacgtggaaacaatcatcagatccttgccccaccccttgcttccagaaagggttttaaagcccatgccccaactctgccagcccccacctgccaggacgttctagcaggacatcggtgctttgctgtccatcttcccatgctgcaatttcttcctgagatttctataaatataaatgtatgtatgtattata

SEQ ID NO: 155 - DNA, 1809 bp, Homo sapiens
tcgagcccgctttccagggaccctacctgagggcccacaggtgaggcagcctggcctagcaggccccacgccaccgcctctgcctccaggccgcccgctgctgcggggccaccatgctcctgcccaggcctggagactgacccgaccccggcactacctcgaggctccgcccccacctgctggaccccagggtcccaccctggcccaggaggtcagccagggaatcattaacaagaggcagtgacatggcgcagaaggagggtggccggactgtgccatgctgctccagacccaaggtggcagctctcactgcggggaccctgctacttctgacagccatcggggcggcatcctgggccattgtggctgttctcctcaggagtgaccaggagccgctgtacccagtgcaggtcagctctgcggacgctcggctcatggtctttgacaagacggaagggacgtggcggctgctgtgctcctcgcgctccaacgccagggtagccggactcagctgcgaggagatgggcttcctcagggcactgacccactccgagctggacgtgcgaacggcgggcgccaatggcacgtcgggcttcttctgtgtggacgaggggaggctgccccacacccagaggctgctggaggtcatctccgtgtgtgattgccccagaggccgtttcttggccgccatctgccaagactgtggccgcaggaagctgcccgtggaccgcatcgtgggaggccgggacaccagcttgggccggtggccgtggcaagtcagccttcgctatgatggagcacacctctgtgggggatccctgctctccggggactgggtgctgacagccgcccactgcttcccggagcggaaccgggtcctgtcccgatggcgagtgtttgccggtgccgtggcccaggcctctccccacggtctgcagctgggggtgcaggctgtggtctaccacgggggctatcttccctttcgggaccccaacagcgaggagaacagcaacgatattgccctggtccacctctccagtcccctgcccctcacagaatacatccagcctgtgtgcctcccagctgccggccaggccctggtggatggcaagatctgtaccgtgacgggctggggcaacacgcagtactatggccaacaggccggggtactccaggaggctcgagtccccataatcagcaatgatgtctgcaatggcgctgacttctatggaaaccagatcaagcccaagatgttctgtgctggctaccccgagggtggcattgatgcctgccagggcgacagcggtggtccctttgtgtgtgaggacagcatctctcggacgccacgttggcggctgtgtggcattgtgagttggggcactggctgtgccctggcccagaagccaggcgtctacaccaaagtcagtgacttccgggagtggatcttccaggccataaagactcactccgaagccagcggcatggtgacccagctctgaccggtggcttctcgctgcgcagcctccagggcccgaggtgatcccggtggtgggatccacgctgggcctaggatgggacgtttttcttcttgggcccggtccacaggtccaaggacaccctccctccagggtcctctcttccacagtggcgggcccactcagccccgagaccacccaacctcaccctcctgacccccatgtaaatattgttctgctgtctgggactcctgtctaggtgcccctgatgacgggatgctctttaaataataaagatggttttgattaaaaaaaaaaaaaaaaaaaaaaaaaa

SEQ ID NO: 156 - DNA, 9027 bp, Homo sapiens
ggatctgacagtgttccggagccggggcgagcagccaaaaggcccgcggagtcgcgctgggccgccccggcgcagctgaaccgggggccgcgcctgccaggccgacgggtctggcccagcctggcgccaaggggttcgtgcgctgtggagacgcggagggtcgaggcggcgcggcctgagtgaaacccaatggaaaaagcatgacatttagaagtagaagacttagcttcaaatccctactccttcacttactaattttgtgatttggaaatatccgcgcaagatgttgacgttgcagacttggctagtgcaagccttgtttattttcctcaccactgaatctacaggtgaacttctagatccatgtggttatatcagtcctgaatctccagttgtacaacttcattctaatttcactgcagtttgtgtgctaaaggaaaaatgtatggattattttcatgtaaatgctaattacattgtctggaaaacaaaccattttactattcctaaggagcaatatactatcataaacagaacagcatccagtgtcacctttacagatatagcttcattaaatattcagctcacttgcaacattcttacattcggacagcttgaacagaatgtttatggaatcacaataatttcaggcttgcctccagaaaaacctaaaaatttgagttgcattgtgaacgaggggaagaaaatgaggtgtgagtgggatggtggaagggaaacacacttggagacaaacttcactttaaaatctgaatgggcaacacacaagtttgctgattgcaaagcaaaacgtgacacccccacctcatgcactgttgattattctactgtgtattttgtcaacattgaagtctgggtagaagcagagaatgcccttgggaaggttacatcagatcatatcaattttgatcctgtatataaagtgaagcccaatccgccacataatttatcagtgatcaactcagaggaactgtctagtatcttaaaattgacatggaccaacccaagtattaagagtgttataatactaaaatataacattcaatataggaccaaagatgcctcaacttggagccagattcctcctgaagacacagcatccacccgatcttcattcactgtccaagaccttaaaccttttacagaatatgtgtttaggattcgctgtatgaaggaagatggtaagggatactggagtgactggagtgaagaagcaagtgggatcacctatgaagatagaccatctaaagcaccaagtttctggtataaaatagatccatcccatactcaaggctacagaactgtacaactcgtgtggaagacattgcctccttttgaagccaatggaaaaatcttggattatgaagtgactctcacaagatggaaatcacatttacaaaattacacagttaatgccacaaaactgacagtaaatctcacaaatgatcgctatctagcaaccctaacagtaagaaatcttgttggcaaatcagatgcagctgttttaactatccctgcctgtgactttcaagctactcaccctgtaatggatcttaaagcattccccaaagataacatgctttgggtggaatggactactccaagggaatctgtaaagaaatatatacttgagtggtgtgtgttatcagataaagcaccctgtatcacagactggcaacaagaagatggtaccgtgcatcgcacctatttaagagggaacttagcagagagcaaatgctatttgataacagttactccagtatatgctgatggaccaggaagccctgaatccataaaggcataccttaaacaagctccaccttccaaaggacctactgttcggacaaaaaaagtagggaaaaacgaagctgtcttagagtgggaccaacttcctgttgatgttcagaatggatttatcagaaattatactatattttatagaaccatcattggaaatgaaactgctgtgaatgtggattcttcccacacagaatatacattgtcctctttgactagtgacacattgtacatggtacgaatggcagcatacacagatgaaggtgggaaggatggtccagaattcacttttactaccccaaagtttgctcaaggagaaattgaagccatagtcgtgcctgtttgcttagcattcctattgacaactcttctgggagtgctgttctgctttaataagcgagacctaattaaaaaacacatctggcctaatgttccagatccttcaaagagtcatattgcccagtggtcacctcacactcctccaaggcacaattttaattcaaaagatcaaatgtattcagatggcaatttcactgatgtaagtgttgtggaaatagaagcaaatgacaaaaagccttttccagaagatctgaaatcattggacctgttcaaaaaggaaaaaattaatactgaaggacacagcagtggtattggggggtcttcatgcatgtcatcttctaggccaagcatttctagcagtgatgaaaatgaatcttcacaaaacacttcgagcactgtccagtattctaccgtggtacacagtggctacagacaccaagttccgtcagtccaagtcttctcaagatccgagtctacccagcccttgttagattcagaggagcggccagaagatctacaattagtagatcatgtagatggcggtgatggtattttgcccaggcaacagtacttcaaacagaactgcagtcagcatgaatccagtccagatatttcacattttgaaaggtcaaagcaagtttcatcagtcaatgaggaagattttgttagacttaaacagcagatttcagatcatatttcacaatcctgtggatctgggcaaatgaaaatgtttcaggaagtttctgcagcagatgcttttggtccaggtactgagggacaagtagaaagatttgaaacagttggcatggaggctgcgactgatgaaggcatgcctaaaagttacttaccacagactgtacggcaaggcggctacatgcctcagtgaaggactagtagttcctgctacaacttcagcagtacctataaagtaaagctaaaatgattttatctgtgaattcagattttaaaaagtcttcactctctgaagatgatcatttgcccttaaggacaaaaatgaactgaagtttcacatgagctatttccattccagaatatctgggattctactttaagcactacataaactgactttatcctcagactagctgaatgattttgtgctgtttcaggatgtttgcactgaagaaaaacagaaagcttatctgaaatttataaaactttttgttttgctacatagaaaacagaaggtatttgaataataagcagtgatatgcttagtgagcacagctatactgattttgattagaatagtcatcagagtggcttagggacagttaatataaaagaggagcaaggtgtagaccatcatctacttctgctaaaataacttaaaaagaggtccataggccataactacatgagcccagcttttgtaatctgacaaaaaaatgaggagcagcttcgtgtatatcagtgtacacggtattccttaggtcccttccattggtagtgatgctgcgagttattactggagaaaaggaattctagagctttaacttggcagattaaaagtactcattttttattcatcaataattagtaatctcactagttttcaaaaatttgcatattattgacaacctctttgaagatgcatttcacaaactcaacagagtgccatgataagagctagggatcccccaaactatctcaagcatctaaaaaattgccatttttaaaggcttaaattgtagtagtaaaggggaaaacaggaagtagtagtaaaggggaaaaaaaaccaataaagcatctaaaaaattggcatgttaaaaggcttaaattgctaatgtgtgtatatatatatatatatatacacacacatatcattgacttttcttaagacttcagagtactgggtagatgaacactttatacagtatatatcttcagcttaaatttgttttgagtattttttttatttttaaataagtaggcaaagatttaaatttttttatttttagtaaatgtttgaggcacactaagacaacttgggcaatatttgccaaaacaaaacagaaccccaaaaaatgtacatcttgttcttagcaaatatcattattgtagagacacttaataaagagatggtattttaatgtctgcagttctgaggtagggtggaacttagttctacattgtgatttaggaatttttaaaaccttttttcttcaagggagaagtgacccaggcctcgagtttagtgctaaagccgctagtgtacttatgctgtcccctaaccaccacgtgcgatatggaagcagatgctaaatataggggttttcttagaaagtaagaggaaattagcaagcgttattagtgattgactactgctatcaagtgaattcaaaggaaacaggtttttatgccatatttaagttacagaaaccaggcatgcttagaatagtttctagaggttattggagaatagaaagctaagaaaacttggtatacatttacaatggaaatataattacactttttactctcagaatattgttcacattagacttcctgtttatcttttatattcttgcatttatataatgcctcatcctttcaaagttctttcacatattatatgatcttctttatgaaaaaaatagatgtttcattctgatatattcagtttcccactttaggcaaaagtagattaatagaatgacgaattcaaagtagatgaggaaaatcaggcacagagaagtaaaggtagggatagacccaaatttacacaacaagataatgacatctccagcttttaagttgatcatcaaaggctgggctggatttgtcttgctgtatgtgtcaggaaatttatacctattacattttccattttctcaaaatttaagtcacatgactaatatttagctgcaactttcctcataacaaatagtgtcatgaagaatgttgtagtgtgaagtttgtacatttcagggtcagatatacaatatgaactcttaatctacaggaatgagaatggaggatcattgaaggccatgatataaacaaatttgcatgttgaagcctgtataaaacatggtacagtgagtgaatatacccccatccccaagaacactttatacatattaaatggatatatgattactgtgcaaaaattcattctggaaatgaacatatatttgagcactaatatgtaatgtacacctgccctaaggagaaaataaattataaaactttttacattcaaaattactttcccaagcatgtcttagaataatctatgtgttgatgcatgtaaattgtactttaggtaggcaaagaaatctggttatttatgtaaaaactagtctaataaagttagttagtggctttatcactttaaatctttagtgtccaaaagtggtgtttaaagtaatagcacatcagaaaaccttgtctggacaaaactagttcactcactgcttctgcacctgcagttgctccctttagggttataaaataatgacccaaatgttacatgtgttgatattataacttgtcagttactgatgtctgtggtatcctaccctcatctctgaaagggataatactgaataattattagaaaactataaaacttcacactttgtaccattaaaacctaaaattttaatcttgtccttttttactatggatcagtcggcactcgggaacagcagcaaggaaaaaaagcaaatttcattcacatgttctgtgttcatacctcttctctacctaattgttcatttaaatttcagccttattccttgataagggattttaccacatgaagtcatccagtgaccctagctcttattgtgaagttagtggagtatacttagaaatgttacaactttaaaatgttacaaaacattcattaaagctcatatttaaagtagagcatctagtttgagaaatagaaatcaattattaaagatgtcttttttctacccatttaactagttaaaaccatgacatgtaaatgtagaagtagaataatcatagaattccctaaaatatttctgtttactaacatatattgaccaagtacatcaagcaggagagatcttccttcattctgttatagtccacatcattctaattttgctcagttgttattaagagcatattcctaaaccatacacttttgtttcaataaagttttattttgttgagatgaataaaataacaaagttataagctgcataagacaaaagttcaattgttcaaaaaaaatttactgggatagctttctattacaggtattgttagattatattgtgctgataagattactttctaaaaaatttgtacttttctgtaaattaaaagaatatggagtcataaaatggcaagtgttttaggattagcctaaaattggacattgtcattgatttcaaagaaggtatgaactagcagtcttacagcctaattcttctttggactggtccttggcagcagttccttttcagactcgataaacagaattcagatgatgtaagtcaaaacaaaactttacaaagccaagcgtattatcttttgcattaacctatttttttccatcatacatgctactagtatgtgcattagcatgatattctcatatacattgcattaaaaattaaaaggtggcagctcagggtgagctcttctgttgctcatttgttcctaaatttttaagggctttttctcagtcaatagtttgtacaaactggttagtttaacttcattacccatttcattaaagttgatgggtcgtgtgatgagatgcatttaaggccgatagtgatagatgttttttttatttcttgaacacaggctttgtctgaatgatgttcttttatctcttgaacacaagctttgaatgataactacaggttttaagtgctgttacattaataccataatgtgatgtgttagaaacaaagggatatttcaaaggtagatatttgaaaattctctagtctcaatatgtatgtgtattgaatatactctaaaaataaatgtgcaatttgctagtaggacaatgcagtgactgactagcattaggtatgtttcttttatatcctagctatgtcccactttcttctaagtgcaatcctttcatgttcacttgctgttttaccccatctactctaacttcatttggaaggcttgtctagagtatagcatgtatttttacctttgcagtgaattgcatgtgctaattgtaaccacagctatttttatgttgacataactccaaatgttatattaaatgttctattatatattagctctaatcccttaagtaaattttaagaaataaatacttgttcaaattttttttctgtatgtggttactatcatctgactatgcatatttgtaacagcatttatcattagtggtgttagctaaataagcatcttagtgtaaatgagatgcttcgtgtgggttttgtgacattttaaatgacataatggaatgtgatttaaaagaaaaccagtacactatcttggtcttaataacatagaatggagatggcaaatttatccactagttttccagatttactatttaatagctgaggtctgaaatcgtagcatcctccctcctagtggacattaaaaaaaaaaaaaaaaaaaaaaacctacttggttgtcaagagcccaagtatggaggtgctgcgccatcttgtggcctgtctgtgcccaccctgcactctgctggagtctccatccttgttgcagtgagacttgaagttcaagattgatacatggcatcctcctgctacttcttgaggttactaagtagtatatgaaactaatcagtcagcaagtccacctggaaggaaaagaaaatctcaactattaatgtgccttcacattgtgattttgtctaaaaaaatgtagtgagtcaaaaaacccacaagccagccaacagtaactccttcacatatataccagagtttatagaaataacatgtcagctttgggctatgtgctcctttgtttaaaatcttctatttggttatggcttgtataggctcaagcctgatttctttaaggtgtggtggctcatcttatcctaatgtgtatgatagatacagtccatcctgctttggaaaagattatgtaactccttgagagcatactctttctctagcccaaaggcagtgagagagttttcttgttcaggattgcttaactttccatttaagctttttctttttaaattaatacaaacttctacactttcaaaatacgaaatatattacaactgcgtataggctcttccatacttaagtccagtgcttgggcaagttaatggagtgaaagactacaagcaaagaggaactgaggtagaaaaagaagaatgtgtgaaagcagcaggaagctcagccaactcgaaagcagggtgaacagcttgagtcctgttgctgctgatcggggttggctcttggacaacttagtaagatcatggaaaggctgcttgggttctccatagaaaagttctgtctccatcaagggaggaaaatgtacctttcaactcaaaattcaatatttgtttttaaatatagctattttccccaaccgctaaagattttcaacagatacgaagccagagcttagttttagaaacctgtggacattcaaacctgattctttattccctgtgactatggttatgtcattttacatgtcaaaaaagtgtatctagaattgtcatttcttatttttgagctttttttagtgagaattatcccctcacttaaatggctttttatttaaacatctgtgcattctgtatgaaattgtagtctttctgggataacatggtgagctatatggtggtaatccacacacacaaaaataaaagccaaaaaaaaaccaaaa

SEQ ID NO: 157 - DNA, 5361 bp, Homo sapiens
tttctccttccctccacgggccgggtgagaaagtagccgggggctatcccgacccggcggttcttggggagggggccgaacaagaaaagggaggagatggagataacttccccggatttagcttttttgtctttgtttttgttctcaccacttccatcggatgactggagagtaaaagggaacccggagcggggtggcgagcagcgctttgagaaaatgcaggagtgtgtttggagacgcgtaaagttgcctttcaagctctggcctccgggcacgcgatgctccgcggcgggctgactcagggctgccttgggcctccctgccaccctcctggaaatgatgcaagtcctgactgtcacctggatccctgcagcccagcctggaatgcgtctggattaggggaaagacgagaaacgacactccaggtgttgcacggcccaccaaagcgggaagatagggcagttgctcagaccaaatactgtatctagtgcttctgctcctatcttcaatcgtggggttctttttaatgcaaagtgtcacaaggccaggaattcccatgtgtgctcagttggcccacagcatcattgtgcctaggaaactgcttcaatttatcaagtcctctgggctgggaatctcactgaattccaaacggcggaaagaggaaactttcccaacccgatgtgggtgtgacgcgagccaggggccccagggacactgtcccagagcacaccgtccccctttaacagcaactggagcttggattcgctcttatattgtacagtcctttcgaccattgccctggagcacccgcacacgcgcacgcatctccggccgcgctcacacacactcatacacacgcacgcaaacgcgtggccgccgccaggtcggcaactttgtccggcgctcccagcggcgctcggcttcctcctgtagtagttgagcgcaggccccgcctcccggccgtgttgtcaaaagggccggggtctcggattggtccagccgccgggacaacacctgctcgactccttcattcaagtgacaccagagcttccagggatatttgaggcaccatccctgccattgccgggcactcgcggcgctgctaacggcctggtcacatgctctccggagagctacgggagggcgctgggtaacctctatccgagccgcggccgcgaggaggagggaaaaggcgagcaaaaaggaagagtgggaggaggaggggaagcggcgaaggaggaagaggaggaggaggaagaggggagcacaaaggatccaggtctcccgacgggaggttaataccaagaaccatgtgtgccgagcggctgggccagttcatgaccctggctttggtgttggccacctttgacccggcgcgggggaccgacgccaccaacccacccgagggtccccaagacaggagctcccagcagaaaggccgcctgtccctgcagaatacagcggagatccagcactgtttggtcaacgctggcgatgtggggtgtggcgtgtttgaatgtttcgagaacaactcttgtgagattcggggcttacatgggatttgcatgacttttctgcacaacgctggaaaatttgatgcccagggcaagtcattcatcaaagacgccttgaaatgtaaggcccacgctctgcggcacaggttcggctgcataagccggaagtgcccggccatcagggaaatggtgtcccagttgcagcgggaatgctacctcaagcacgacctgtgcgcggctgcccaggagaacacccgggtgatagtggagatgatccatttcaaggacttgctgctgcacgaaccctacgtggacctcgtgaacttgctgctgacctgtggggaggaggtgaaggaggccatcacccacagcgtgcaggttcagtgtgagcagaactggggaagcctgtgctccatcttgagcttctgcacctcggccatccagaagcctcccacggcgccccccgagcgccagccccaggtggacagaaccaagctctccagggcccaccacggggaagcaggacatcacctcccagagcccagcagtagggagactggccgaggtgccaagggtgagcgaggtagcaagagccacccaaacgcccatgcccgaggcagagtcgggggccttggggctcagggaccttccggaagcagcgagtgggaagacgaacagtctgagtattctgatatccggaggtgaaatgaaaggcctggccacgaaatctttcctccacgccgtccattttcttatctatggacattccaaaacatttaccattagagaggggggatgtcacacgcaggattctgtggggactgtggacttcatcgaggtgtgtgttcgcggaacggacaggtgagatggagacccctggggccgtggggtctcaggggtgcctggtgaattctgcacttacacgtactcaagggagcgcgcccgcgttatcctcgtacctttgtcttctttccatctgtggagtcagtgggtgtcggccgctctgttgtgggggaggtgaaccagggaggggcagggcaaggcagggcccccagagctgggccacacagtgggtgctgggcctcgccccgaagcttctggtgcagcagcctctggtgctgtctccgcggaagtcagggcggctggattccaggacaggagtgaatgtaaaaataaatatcgcttagaatgcaggagaagggtggagaggaggcaggggccgagggggtgcttggtgccaaactgaaattcagtttcttgtgtggggccttgcggttcagagctcttggcgagggtggagggaggagtgtcatttctatgtgtaatttctgagccattgtactgtctgggctgggggggacactgtccaagggagtggcccctatgagtttatattttaaccactgcttcaaatctcgatttcactttttttatttatccagttatatctacatatctgtcatctaaataaatggctttcaaacaaagcaactgggtcattaaaaccagctcaaagggggtttaaaaaaaaaaaaccagcccatcctttgaggctgatttttcttttttttaagttctattttaaaagctatcaaacagcgacatagccatacatctgactgcctgacatggactcctgcccacttgggggaaaccttatacccagaggaaaatacacacctggggagtacatttgacaaatttcccttaggatttcgttatctcaccttgaccctcagccaagattggtaaagctgcgtcctggcgattccaggagacccagctggaaacctggcttctccatgtgaggggatgggaaaggaaagaagagaatgaagactacttagtaattcccatcaggaaatgctgaccttttacataaaatcaaggagactgctgaaaatctctaagggacaggattttccagatcctaattggaaatttagcaataaggagaggagtccaaggggacaaataaaggcagagagaagagacagaactaaaaatacgaggaaaggagagtgaggattttcattaaaagtctcagcagtgggtttcttgggttatttaaaacatcacctaaataggccttttcttcctaattggccatcaaattaaagcctatcctttctcaagcaggagctggtattgtagggagtggccgggtattctgggctgggctcttctggagtagggggtcagcaaacattgtctgcaaagggccagatactgaatccagtactttcagtttggcgagccgtgaggtctctgtcgaaactactcaactctgccgtcctagcacaaaagcagccatagacaacacacaaacgagagggcttggctcccttccaggaagatttatttaacaggctcccagctgaatttcactcacaggacacagtttactgatctctgttctagtgagtgggtcaaaaagcatatgcatccttatccgtcaactcatcagctcttcctcaaggcaacctgaggccagacaccaagaaaccaagcgtatctgctctaaaatgacttgttcctggggaatgccttcaaccaaaacacagctagtatttctatgccccaaatccaatcccagtctttcatgatccatgccggcggttgggtggggaggggaatcattggttgggggaagggaggaaaccccacctccagcccccgccaccgggctccctgggcacccagcaagatctggggctgcagagaacagaagagctggtgcacttaatccagctctgcccttggggggaggaggacctgtgtgtcaggctctgccatgggaacgagtgtaaaccgtggctgtctcctgcagtgagccaccgcggcaggcacgttgactgttttactgacatcactcaaaagctaaagcaataacattctcctgcgttgctgagtcagctgttcatttgtccgccagctcctggactggatgtgtgaaaggcatcacatttccattttcctccgtgtaaatgttttatgtgttcgcctactgatcccattcgttgcttctattgtaaatatttgtcatttgtatttattatctctgtgttttccccctaaggcataaaatggtttactgtgttcatttgaacccatttactgatctctgttgtatatttttcatgccactgctttgttttctcctcagaagtcgggtagatagcatttctatcccatccctcacgttattggaagcatgcaacagtatttattgctcagggtcttctgcttaaaactgaggaaggtccacattcctgcaagcattgattgagacatttgcacaatctaaaatgtaagcaaagtagtcattaaaaatacaccctctacttgggctttatactgcatacaaatttactcatgagccttcctttgaggaaggatgtggatctccaaataaagatttagtgtttattttgagctctgcatcttaacaagatgatctgaacacctctcctttgtatcaataaatagccctgttattctgaagtgagaggaccaagtatagtaaaatgctgacatctaaaactaaataaatagaaaacaccaggccagaactatagtcatactcacacaaagggagaaatttaaactcgaaccaagcaaaaggcttcacggaaatagcatggaaaaacaatgcttccagtggccacttcctaaggaggaacaaccccgtctgatctcagaattggcaccacgtgagcttgctaagtgataatatctgtttctactacggatttaggcaacaggacctgtacattgtcacattgcattatttttcttcaagcgttaataaaagttttaaataaatggcaaaaaaaaaaaaaaaaaa

SEQ ID NO: 158 - DNA, 3566 bp, Homo sapiens
agtgattgtcttccagcttcgcgaaggctaggggcgcggctgccgggtggctgcgcggcgctgcccccggaccgaggggcagccaacccaatgaaaccaccgcgtgttcgcgcctggtagagatttctcgaagacaccagtgggcccgttccgagccctctggaccgcccgtgtggaaccaaacctgcgcgcgtggccgggccgtgggacaacgaggccgcggagacgaaggcgcaatggcgaggaagttatctgtaatcttgatcctgacctttgccctctctgtcacaaatccccttcatgaactaaaagcagctgctttcccccagaccactgagaaaattagtccgaattgggaatctggcattaatgttgacttggcaatttccacacggcaatatcatctacaacagcttttctaccgctatggagaaaataattctttgtcagttgaagggttcagaaaattacttcaaaatataggcatagataagattaaaagaatccatatacaccatgaccacgaccatcactcagaccacgagcatcactcagaccatgagcgtcactcagaccatgagcatcactcagagcacgagcatcactctgaccatgatcatcactctcaccataatcatgctgcttctggtaaaaataagcgaaaagctctttgcccagaccatgactcagatagttcaggtaaagatcctagaaacagccaggggaaaggagctcaccgaccagaacatgccagtggtagaaggaatgtcaaggacagtgttagtgctagtgaagtgacctcaactgtgtacaacactgtctctgaaggaactcactttctagagacaatagagactccaagacctggaaaactcttccccaaagatgtaagcagctccactccacccagtgtcacatcaaagagccgggtgagccggctggctggtaggaaaacaaatgaatctgtgagtgagccccgaaaaggctttatgtattccagaaacacaaatgaaaatcctcaggagtgtttcaatgcatcaaagctactgacatctcatggcatgggcatccaggttccgctgaatgcaacagagttcaactatctctgtccagccatcatcaaccaaattgatgctagatcttgtctgattcatacaagtgaaaagaaggctgaaatccctccaaagacctattcattacaaatagcctgggttggtggttttatagccatttccatcatcagtttcctgtctctgctgggggttatcttagtgcctctcatgaatcgggtgtttttcaaatttctcctgagtttccttgtggcactggccgttgggactttgagtggtgatgcttttttacaccttcttccacattctcatgcaagtcaccaccatagtcatagccatgaagaaccagcaatggaaatgaaaagaggaccacttttcagtcatctgtcttctcaaaacatagaagaaagtgcctattttgattccacgtggaagggtctaacagctctaggaggcctgtatttcatgtttcttgttgaacatgtcctcacattgatcaaacaatttaaagataagaagaaaaagaatcagaagaaacctgaaaatgatgatgatgtggagattaagaagcagttgtccaagtatgaatctcaactttcaacaaatgaggagaaagtagatacagatgatcgaactgaaggctatttacgagcagactcacaagagccctcccactttgattctcagcagcctgcagtcttggaagaagaagaggtcatgatagctcatgctcatccacaggaagtctacaatgaatatgtacccagagggtgcaagaataaatgccattcacatttccacgatacactcggccagtcagacgatctcattcaccaccatcatgactaccatcatattctccatcatcaccaccaccaaaaccaccatcctcacagtcacagccagcgctactctcgggaggagctgaaagatgccggcgtcgccactctggcctggatggtgataatgggtgatggcctgcacaatttcagcgatggcctagcaattggtgctgcttttactgaaggcttatcaagtggtttaagtacttctgttgctgtgttctgtcatgagttgcctcatgaattaggtgactttgctgttctactaaaggctggcatgaccgttaagcaggctgtcctttataatgcattgtcagccatgctggcgtatcttggaatggcaacaggaattttcattggtcattatgctgaaaatgtttctatgtggatatttgcacttactgctggcttattcatgtatgttgctctggttgatatggtacctgaaatgctgcacaatgatgctagtgaccatggatgtagccgctgggggtatttctttttacagaatgctgggatgcttttgggttttggaattatgttacttatttccatatttgaacataaaatcgtgtttcgtataaatttctagttaaggtttaaatgctagagtagcttaaaaagttgtcatagtttcagtaggtcatagggagatgagtttgtatgctgtactatgcagcgtttaaagttagtgggttttgtgatttttgtattgaatattgctgtctgttacaaagtcagttaaaggtacgttttaatatttaagttattctatcttggagataaaatctgtatgtgcaattcaccggtattaccagtttattatgtaaacaagagatttggcatgacatgttctgtatgtttcagggaaaaatgtctttaatgctttttcaagaactaacacagttattcctatactggattttaggtctctgaagaactgctggtgtttaggaataagaatgtgcatgaagcctaaaataccaagaaagcttatactgaatttaagcaaagaaataaaggagaaaagagaagaatctgagaattggggaggcatagattcttataaaaatcacaaaatttgttgtaaattagaggggagaaatttagaattaagtataaaaaggcagaattagtatagagtacattcattaaacatttttgtcaggattatttcccgtaaaaacgtagtgagcacttttcatatactaatttagttgtacatttaactttgtataatacagaaatctaaatatatttaatgaattcaagcaatatatcacttgaccaagaaattggaatttcaaaatgttcgtgcgggtatataccagatgagtacagtgagtagttttatgtatcaccagactgggttattgccaagttatatatcaccaaaagctgtatgactggatgttctggttacctggtttacaaaattatcagagtagtaaaactttgatatatatgaggatattaaaactacactaagtatcatttgattcgattcagaaagtactttgatatctctcagtgcttcagtgctatcattgtgagcaattgtcttttatatacggtactgtagccatactaggcctgtctgtggcattctctagatgtttcttttttacacaataaattccttatatcagcttga

SEQ ID NO: 159 - DNA, 8555 bp, Homo sapiens
gctaaatggttaagagatacataaatactgcagtagagatgggattttacctcaaagtgcaaaggtaaatgaaataaagttttttcaatggaaggcttgcagctcttgaggacctgccaaatggaagaaggacagagacctggagccctatggaaagttctgacaccatgtgtggaaggacatggcttttaacacgtgtggtgactggagtagctgcagctgaggacagccaccctttcttcgtctctgctgagcgaaggctacacggcccttcctccttgcagctgtttcaccttctaccttgcgtggagccaggcttttgcaccgaatctgagatgccattttaaacagaagactccatcctcttgaagatgggaaattcttacgctggacagctgaagacgacacgctttgaagaggtcttgcacaattccatcgaggcatccctgcggtccaacaacctggtgcccaggcccatcttttcccagctgtacctggaagctgagcagcagcttgccgctctagaaggtggtagccgagtggacaatgaggaagaggaagaagagggagaaggagggctggaaacaaatggccccccaaaccctttccagctgcaccctctgcctgaaggatgctgtaccacagacgggttttgccaggccgggaaggacctgcgccttgtctccatttccaacgagcccatggatgtccctgcgggctttctcctcgtgggggtcaagtcccccagcctgccggaccatctcctggtgtgcgccgttgacaagaggttcttgccagatgacaatggccacaatgctcttcttggtttctctgggaattgtgttggctgtggaaagaaaggcttctgttacttcacggaattctccaatcatataaatctgaaactgaccactcaacccaagaagcagaaacacttgaagtattacctggtccgtaatgcacaagggactctaaccaaaggacctttaatctgttggaaaggctcagagtttagaagccggcagatccccgccagtacttgttccagttccctcttcccagccctggagagcacggctgccttccccagcgagcccgttcctgggacgaaccccagcatcctgatgggagctcagcaggcaggaccagcttctgatcacccctcactaaacgcagcaatgggtccggctgttttcaacggcaaagattccccgaagtgccaacaactggcaaagaataacctgttggccctgccgcgaccatcggctttaggtatcttgtcaaactccgggccccccaaaaaacgccacaaagggtggtctccagaatctccatcagctccagatggtggctgcccccaaggtggtgggaacagagctaagtatgagagcgcaggcatgtcctgcgtgccgcaggttggcttggtgggaccagcttcagtcacctttccagtggtggcctctggagaaccagtgtctgttcctgacaacttgctgaaaatatgcaaggccaagccagtgatatttaaaggccatgggaacttcccttacctctgtgggaacctgaatgacgtcgtggtcagccccctcttgtacacgtgctaccagaattcccagtctgtctcacgggcatacgagcagtacggcgcctctgccatccagcccatctccgaggagatgcagctcctgcttaccgtctactacctggtccagctggccgcggaccaggtgcccttgatggaggacctggagcagatcttcctgcgctcttggcgcgagtcgcacctgaccgagatccggcagtaccagcaggcgccgccgcagcccttcccgcccgcgcccagcgccgcggcacccgtgacctccgcgcagctgccctggctggccagcctggccgccagctcctgcaacgacagcgtgcacgtcatcgagtgtgcttactccctggccgagggcctctccgagatgttccggctgttggtcgagggcaagcttgccaagaccaactacgtggtcatcatctgcgcctgccgcagcgcggccatcgactcctgcatcgccgtcaccggaaaataccaagcccggattctttccgagagccttctcactcctgcggagtaccagaaggaagtcaattacgagctggttacggggaaggtagactcgctgggggccttctttagcaccctctgtccagagggtgacattgacattttgctggacaaatttcaccaggaaaatcaaggccatatttcttcctcactcgctgcctcttctgtcactaaagcagcatccctggatgtcagtgggacaccggtgtgcacaagttacaatctggagccacacagcatccggcccttccagctggcagtagcgcagaagctcctctcccatgtgtgttccattgcggattccagcacccaaaatctggacctgggatcctttgagaaggtggactttctcatttgcattcccccctcagaagtgacctaccagcagactctgctccatgtgtggcattcaggggttttgctggagcttggtctgaagaaagagcacatgacgaagcagagggtggaacagtatgttctgaagctagacacggaggcacagacaaaatttaaggcttttctgcaaaactccttccagaacccgcatacactttttgtcctaatccatgaccatgcgcactgggatcttgtgagtagcactgttcataacctctattctcaaagtgacccgtcggtgggattggtggaccgattgctcaactgcagggaggtgaaggaggcccccaacattgtgacacttcacgtgacctccttcccgtatgcactgcagacacagcacaccctcatcagcccctacaacgagatccactggcctgcctcctgcagtaatggagtggacttatatcatgaaaataagaagtacttcgggctgtcggagtttattgaatccaccctttcaggacacagcctccccttgctcagatacgatagctcctttgaggccatggtcactgcattaggaaaaaggttcccccgcctgcacagcgcggtgatcaggacctttgttctcgtgcagcactacgcggccgccctgatggccgtaagcggcctcccgcagatgaagaactacacgtcggtggagacgctggagatcacgcagaacctcctcaactccccgaagcagtgcccctgcggccacgggctcatggtcctgctgcgggtgccctgttcgcccctggcggtggtggcctatgagcggctggcccacgtgcgggcccggctggcgctggaggagcactttgagatcatcctgggcagtcccagctcaggcgtcaccgtggggaagcacttcgtaaagcagctcaggatgtggcagaaaattgaggatgtggagtggagaccccagacttacttggagctggagggtctgccttgcatcctgatcttcagtgggatggacccgcatggggagtccttgccgaggtctttgaggtactgtgacctgcgattgataaactcctcctgcttggtgagaacagccttggagcaggagctgggcctggctgcctactttgtgagcaacgaggttcccttggagaagggggctaggaacgaggccttggagagtgatgctgagaagctgagcagcacagacaacgaggatgaggagctggggacagaaggctctacctcggagaagagaagccccatgaaaagggagaggtcccgctcccacgactcagcatcctcatccctctcctccaaggcttccggttcagcgctcggtggcgagtcctcggctcagcccacagcactcccccagggagagcatgccaggtcgccccagccccgtggccccgcagaggagggcagagcccctggtgagaaacagaggccccgggcaagtcaggggccaccctcggccatcagcaggcacagtcccgggccgacgccccagcccgactgtagcctcaggaccggccagaggagcgtccaggtgtcggtcacctcgtcgtgctcccagctgtcctcctcctcgggctcatcctcctcatccgtggcgcccgctgccggcacgtgggtcctgcaggcctcccagtgctccttgaccaaggcctgccgccagccacccattgtcttcttgcccaagctcgtgtacgacatggttgtgtccactgacagcagtggcctgcccaaggccgcctccctcctgccctccccctcggtcatgtgggccagctctttccgccccctgctcagcaagaccatgacatccaccgagcagtccctctactaccggcagtggacggtgccccggcccagccacatggactacggcaaccgggccgagggccgcgtggacggcttccacccccgcaggctgctgctcagcggcccccctcagatcgggaagacaggtgcctacctgcagttcctcagtgtcctgtccaggatgcttgttcggctcacagaagtggatgtctatgacgaggaggagatcaatatcaacctcagagaagaatctgactggcattatctccagcttagcgacccctggccagacctggagctgttcaagaagttgccctttgactacatcattcacgacccgaagtatgaagatgccagcctgatttgttcgcactatcagggtataaagagtgaagacagagggatgtcccggaagccggaggacctttatgtgcggcgtcagacggcacggatgagactgtccaagtacgcagcgtacaacacttaccaccactgtgagcagtgccaccagtacatgggcttccacccccgctaccagctgtatgagtccaccctgcacgcctttgccttctcttactccatgctaggagaggagatccagctgcacttcatcatccccaagtccaaggagcaccactttgtcttcagccaacctggaggccagctggagagcatgcgactacccctcgtgacagacaagagccatgaatatataaaaagtccgacattcactccaaccaccggccgtcacgaacatgggctctttaatctgtaccacgcaatggacggtgccagccatttgcacgtgctggttgtcaaggaatacgagatggcaatttataagaaatattggcccaaccacatcatgctggtgctccccagtatcttcaacagtgctggagttggtgctgctcatttcctcatcaaggagctgtcctaccataacctggagctcgagcggaaccggcaggaggagctgggaatcaagccgcaggacatctggcctttcattgtgatctctgatgactcctgcgtgatgtggaacgtggtggatgtcaactctgctggggagagaagcagggagttctcctggtcggaaaggaacgtgtctttgaagcacatcatgcagcacatcgaggcggcccccgacatcatgcactacgccctgctgggcctgcggaagtggtccagcaagacccgggccagcgaggtgcaagagcccttctcccgctgccacgtgcacaacttcatcatcctgaacgtggacctgacccagaacgtgcagtacaaccagaaccggttcctgtgtgacgatgtagacttcaacctgcgggtgcacagcgccggcctcctgctctgccggttcaaccgcttcagcgtgatgaagaagcagatcgtggtgggcggccacaggtccttccacatcacatccaaggtgtctgataactctgccgcggtcgtgccggcccagtacatctgtgccccggacagcaagcacacgttcctcgcagcgcccgcccagctcctgctggagaagttcctgcagcaccacagccacctcttcttcccgctgtccctgaagaaccatgaccacccagtgctgtctgtcgactgttacctgaacctgggatctcagatttctgtttgctatgtgagctccaggccccactctttaaacatcagctgctcggacttgctgttcagtgggctgctgctgtacctctgtgactcttttgtgggagctagctttttgaaaaagtttcattttctgaaaggtgcgacgttgtgtgtcatctgtcaggaccggagctcactgcgccagacggtcgtccgcctggagctcgaggacgagtggcagttccggctgcgcgatgagttccagaccgccaatgccagggaagaccggccgctcttttttctgacgggacgacacatctgaggaagacagcggcgagttttctgaagagatgagtgctcagagccctcatgctgttgaggctaaagggaggcctggaacggtggggcgtttgactggaatggaccccagggactgtccaggtgcagcccctcctagtacacatgggcccccgaggccgtggtcctgggagccaggaagactccgcagtgggtgagaatgaaaacttgagactcccaagttctgggccagcccattgctctgggctgttttaaagcccatttcacgaggaacaaagatttacttcctgtcctgccattcgtgtgcttccatggacaaacctgatttttttctcttagttctaaagaatcttgggttattttgtagcggtgccagtatttcagtagatgggatttcagccaagtaggttcccctgtaacctcctacaaagcaatattccaaaggaacattttaactgtaaaggctggagacaagaaaaaataagtagatcgttttaataacaattatttaattgcctataagtttgctgtttcagaggctagcccaaaggcatcaaatttaataaagttaaacaaattgatttacttcagagcaaatatgatcctattaaaataatatagggtaaataccctacctcttagaaagggcaaaaatgcaaagaagctttctttaaaactaaaagggttttttggggggggagttggcggggaggaaataaggctaacagaggttgacctaaaattagccttacaaaggagaaaggaccacattgcttacttgaaacagacaatgaaaacaaccaaagtgatatataaaatagttgatgagaactagacttatgactgtagtttactagagtttagttttcagttgctgaagtagctcattttctcttactaatgtttggttcctcagggaagaatctcacttgactagagaggaggtgggaacagaagagagaaggaggcagggagatgtatttcttagggctcaccccttcacagactgacagaatggttttgttttgttttgttttgttttgttttgtttttgagatggactctagctctgtcacccaggctggagtgcagtggtgcgatctcggctcactgcaagctccgcctcccgggttctcaccattctcctgcctcagcctcccgagtagctgggactacaggcgcccaccaccacgcccggctaattttttgtattttttagtagagacggggtttcaccatgttagccaggatggtctcgatctcctgacctcgtgatccgcccgcctcggcctcccaaagtgctgggattacaggcgtgagccaccgtgcctgccccagaatggtttttaaagccacagttgagaggccacccattgcccggcgcctggacagtgatcatcttgttcatcttgttcagtcctttcttgtgtgattggaattattcatcccctttgaaagatgagaaggttgagatgcaaagagtctacctttccaagttctcactgctggaaagagctagaagcacagttcaaagttctggcttctggactctgcagtccaggtctcccttctcccacttgcctaccctcaatgccacactgtttttgaagtggcccataacttgaaggaaaagtttaaagacagttcaatttaatcatcagaatgcattcttttttttttcggagacggagtttcactcttgctgcccaggctggagtgcaatggtgcaatgacctcggctcactgcaacctctgcctcctgggttcaagtgattctccagcctcagcctcccgagtagctgggattatgggcgcccaccaccatgcccagctaatttttgtattttttttttttagtagagatggggtttcgccaggttggccaggctggtcttgtgaactcctggcctcaggtgatctgcccacctcatcctccaaaagtgctgggattacaggcatgagccactgcgcctggcctcagaatgcattcttacacatctatcctagacatttataagcactctaatggataacaatccaagaataaatgattgtaaaagatgatgccgaagagttgatgtcaatctttttttcctaagaaaaaaagtccgcgagtattaaatatttagatcaatgtttataaaatgattactttgtatatctcattattcctattttggaataaaaactgaccttctttaatcatatacttgtcttttgtaaatagcagcttttgtgtcattctccccactttattagttaatttaaattggaaaaaaccctcaaactaatattcttgtctgttccagtcttataaataaaacttataatgcatgta

SEQ ID NO: 160 - DNA, 4854 bp, Homo sapiens
gtttttaaaagctttgtatctcttaaaaccatgcagcagtcagtttccaagttttgctttgcaatcagtagttttcaagggagcttttaaagctgaactgaaatgtttgaaatgtggaacactcttgaccatgaaatatgttctacttacatgcctcagcctttaaaagttctttgcattagagtcaaggattacattcttcctggagccaagcatggggccagctgtaaacaagccgcatttctccttggggagactgataatttaaaaggtttgttgtgtcagaaacattcccagcttcatcaccaaccctttccttccacctctgcccactggagaccacttatatcccgaagcggacgcggcagctgaagtcaggaaaccatgcatcacattagcaggagccaactgcagactttaaactccgttcaacatgtggatgcggcagagaaatgacctgtccagacaagccggggcagctcataaactggttcatctgctccctgtgcgtcccgcgggtgcgtaagctctggagcagccggcgtccaaggacccggagaaaccttctgctgggcactgcgtgtgccatctacttgggcttcctggtgagccaggtggggagggcctctctccagcatggacaggcggctgagaaggggccacatcgcagccgcgacaccgccgagccatccttccctgagatacccctggatggtaccctggcccctccagagtcccagggcaatgggtccactctgcagcccaatgtggtgtacattaccctacgctccaagcgcagcaagccggccaatatccgtggcaccgtgaagcccaagcgcaggaaaaagcatgcagtggcatcggctgccccagggcaggaggctttggtcggaccatcccttcagccgcaggaagcggcaagggaagctgatgctgtagcacctgggtacgctcagggagcaaacctggttaagattggagagcgaccctggaggttggtgcggggtccgggagtgcgagccgggggcccagacttcctgcagcccagctccagggagagcaacattaggatctacagcgagagcgccccctcctggctgagcaaagatgacatccgaagaatgcgactcttggcggacagcgcagtggcagggctccggcctgtgtcctctaggagcggagcccgtttgctggtgctggaggggggcgcacctggcgctgtgctccgctgtggccctagcccctgtgggcttctcaagcagcccttggacatgagtgaggtgtttgccttccacctagacaggatcctggggctcaacaggaccctgccgtctgtgagcaggaaagcagagttcatccaagatggccgcccatgccccatcattctttgggatgcatctttatcttcagcaagtaatgacacccattcttctgttaagctcacctggggaacttatcagcagttgctgaaacagaaatgctggcagaatggccgagtacccaagcctgaatcgggttgtactgaaatacatcatcatgagtggtccaagatggcactctttgattttttgttacagatttataatcgcttagatacaaattgctgtggattcagacctcgcaaggaagatgcctgtgtacagaatggattgaggccaaaatgtgatgaccaaggttctgcggctctagcacacattatccagcgaaagcatgacccaaggcatttggtttttatagacaacaagggtttctttgacaggagtgaagataacttaaacttcaaattgttagaaggcatcaaagagtttccagcttctgcagtttctgttttgaagagccagcacttacggcagaaacttcttcagtctctgtttcttgataaagtgtattgggaaagtcaaggaggtagacaaggaattgaaaagcttatcgatgtaatagaacacagagccaaaattcttatcacctatatcaatgcacacggggtcaaagtattacctatgaatgaatgacaaaagaatcttctggctagggtgttagatatatttatgcatttttggttttgtttttaaatcaagcacatcaacctcaagcccgtttagcaatgaggcagtgtagatgaatacgtaaaataaatgactttaaccaagtagctataatgggacttagcactgtatgcatacttaaaaaggttttgaaaaacaaactacttgagaaatatttgtttatatttttctctaacatcatgctatgtgtcagtctgaacatctgacaacagaaatttcagttattattctagctaagttttgaaaacatttgtcatgctgtttaatagaaaactgcaaaccagagacactgactccattaataaaccatattttgtgccgttttgactgttctgaccaaatactaatgggaacaattcttgacgtttttctgttgctgattgttaacatagagcagtctctacactaccctgaggcaactctacattggaacactgaggcttacagcctgcaagagcatcagagctgaccatacatttaaacagaaatgctggtttatttgcaaaatcaccagtatattttctattgtgtctataaaaaatcagtcatttaagtacaagaatcatattttccattcctttttagaaatttattttgttgtccctatggaaatcattcacatctgacaatttatatgttaaagagttttactctctctattttggtccaatttgtatctagtggctgagaaattaaataattctaaagtatgaagttacctatctgaaaatgtacttacagagtatcattttaaaatggatgtctctttaaaaattttgttacttttaccaacaatgtaatataatttatgtatattttattaataatagtgaattccttaaaatttgttctatgtacttatatttaatttgatttaatggttactgcccagatattgagaattggttcaaatattgagtgtgtttcaatatattatctggcttatttcaacatgagtaatatgagcaaaataagttaaaacctgcgtctgatcaattttcctcatgactagaactaaaacagtaaatttggacaatattaagcctcaaataatcatctccaaactccttctaacactttttaaatcagattggaagacatggacaaatcaggttcatgtgttgcatctttatgtcctttgccaatatccaagatcatcacatatggtagatattcacatggagtttcaaattcagaatagattaccattaccttcctgcccttacacatcctactccttatttaaaagttctatttgtgacttttcatttcctgaaagtttaaaaatacaatttgagaatgtttataatacattctctcctgtcttttcacggttacgtctgttattgctgaaatacaccacattttctttgttctggtcaaggttaactcaatatctgtgtgaaagagaactactaacaacgttacaatagaggctagatttgaaaaaaaaaatctatagatctaattgatacaattgtagaacaaaatgtcaaaataatgttttaagtataagagaagatggaccaaggagagagagatcatttgaaaatctaattgtagcttttctaggctcacattcatgtactacttttagcacccttatgggctgtgctcgccccctggacagttgagctttggattatcttcctcttcaattttccctctattgacccgagtgtctccctctgcttctacagatttatagtactccttggctcttttgagtctccacttttactcactgtctctgggatttttaagatccttttcttctcttataaatcatcctcttaatgaaaattagcctaacaaaagtttggagactggaatcctactttgagccactgacttgaaataactcttttggcaagttgcctgacatcctgtcttaccaaggtggcatatttgcatttttactgcttaaaacatttttttttttttaccatctttatccaaatttatcatattgatggtaggactaacaggctttttagaagctggctttaactttgagtctcaagctacaatgctgttgggcagcctggtcttcccacgtgagggtttaactttgtttatttgcctccagttattccaaaatgcttattaaatgaaagtcccaggaacatgtttattttagtcacctttgctttttaacaattttgttttgtaatcaatgagtaattcatgatgaattatttttgactaatggatagccgaaggccaggcttttaattctaataggtaatgttcttcttttgtcttattgaaacaatgagaatactctgtgcatttcaaatgcactccgattatgctgtggttttattcacataagcacaatatgtgttttatttataacttcataacaaacttataatataataatttaccttagcagacatgcaaaagcttattcttgtgtgacttactttctttaagctaataatataaaaataaatatgtatcttaaaaatctataataaaacattagaaattaaagatatgtgctttttattttgcagatgagttcatttgcttttgtagatgtgttttcagagctaggtacagaggaatgtttgctacctttagcggtgaaaaaagaaagagagtcaagaattttgttggattgtgtttgtgtgtgcatatatttgatatcatcattatatttgtaatctttggacttgtaatcatagcctgtttattctactgtgccattaaatatactttaccttatacataacgaataaaatacctagaagtagatttatttacaaaaaaaaaaaaaaaa

SEQ ID NO: 161 - DNA, 1486 bp, Homo sapiens
cgagtgtggccaagggtgccggaggcagggttcgggtgcgtagtcgttgcgtgggcgctgcccaaaaggcgcagagcatcaagtgtgcgtgggcagaaccggcgcgggcgcccgccgcgggtctgcgcggggcgggggcgcagcaagtgcatccgagcgagcggagactagcgcaccggcgtcggtggcgagggtggtgcagaggagtccggctgggcggagggaggaaggatgggtgcgggtaactttttgaccgccttggaagtaccagtagccgcgctcgcaggggctgcctccgaccgccgggcgagctgcgagcgagtgagcccgccaccgcccctcccccacttccgcctcccgcctcttcctcgttcccggctcccagggcccgtgtccaggccggagccaggggccccactgttgggatgctggctgcagtggggcgccccaagcccaggtcccctctgtcttctctttcgactttgcagctgtacttgttttgctcctctacccgcaggagctgacatggacccaaatcctcgggccgccctggagcgccagcagctccgccttcgggagcggcaaaaattcttcgaggacattttacagccagagacagagtttgtctttcctctgtcccatctgcatctcgagtcgcagagaccccccataggtagtatctcatccatggaagtgaatgtggacacactggagcaagtagaacttattgaccttggggacccggatgcagcagatgtgttcttgccttgcgaagatcctccaccaaccccccagtcgtctgggatggacaaccatttggaggagctgagcctgccggtgcctacatcagacaggaccacatctaggacctcctcctcctcctcctccgactcctccaccaacctgcatagcccaaatccaagtgatgatggagcagatacgcccttggcacagtcggatgaagaggaggaaaggggtgatggaggggcagagcctggagcctgcagctagcagtgggcccctgcctacagactgaccacgctggctattctccacatgagaccacaggcccagccagagcctgtcgggagaagaccagactctttacttgcagtaggcaccagaggtgggaaggatggtgggattgtgtacctttctaagaattaaccctctcctgctttactgctaattttttcctgctgcaaccctcccaccagtttttggcttactcctgagatatgatttgcaaatgaggagagagaagatgaggttggacaagatgccactgcttttcttagcactcttccctcccctaaaccatcccgtagtcttctaatacagtctctcagacaagtgtctctagatggatgtgaactccttaactcatcaagtaaggtggtactcaagccatgctgcctccttacatcctttttggaacagagcacggtataaataataaactaataataatatgccaaccaaaaaa

SEQ ID NO: 162 - DNA, 3826 bp, Homo sapiens
aatagaagccaggaggcggggcggggaagcggcgcggtcaggtgctccgctccagagttgagcgcaggtgagctcctgcgcgttccgggggcgttcctccagtcaccctcccgccgttacccgcggcgcgcccgagggagtctcctccagaccctccctcccgttgctccaaactaatacggactgaacggatcgctgcgaggattatcttacactgaactgatcaagtactttgaaaatgacttcgaaatttctcttggtgtccttcatacttgctgcactgagtctttcaaccaccttttctctccaaccagaccagcaaaaggttctactagtttcttttgatggattccgttgggattacttatataaagttccaacgccccattttcattatattatgaaatatggtgttcacgtgaagcaagttactaatgtttttattacaaaaacctaccctaaccattatactttggtaactggcctctttgcagagaatcatgggattgttgcaaatgatatgtttgatcctattcggaacaaatctttctccttggatcacatgaatatttatgattccaagttttgggaagaagcgacaccaatatggatcacaaaccagagggcaggacatactagtggtgcagccatgtggcccggaacagatgtaaaaatacataagcgctttcctactcattacatgccttacaatgagtcagtttcatttgaagatagagttgccaaaattattgaatggtttacgtcaaaagagcccataaatcttggtcttctctattgggaagaccctgatgacatgggccaccatttgggacctgacagtccgctcatggggcctgtcatttcagatattgacaagaagttaggatatctcatacaaatgctgaaaaaggcaaagttgtggaacactctgaacctaatcatcacaagtgatcatggaatgacgcagtgctctgaggaaaggttaatagaacttgaccagtacctggataaagaccactataccctgattgatcaatctccagtagcagccatcttgccaaaagaaggtaaatttgatgaagtctatgaagcactaactcacgctcatcctaatcttactgtttacaaaaaagaagacgttccagaaaggtggcattacaaatacaacagtcgaattcaaccaatcatagcagtggctgatgaagggtggcacattttacagaataagtcagatgactttctgttaggcaaccacggttacgataatgcgttagcagatatgcatccaatatttttagcccatggtcctgccttcagaaagaatttctcaaaagaagccatgaactccacagatttgtacccactactatgccacctcctcaatatcaccgccatgccacacaatggatcattctggaatgtccaggatctgctcaattcagcaatgccaagggtggtcccttatacacagagtactatactcctccctggtagtgttaaaccagcagaatatgaccaagaggggtcatacccttatttcataggggtctctcttggcagcattatagtgattgtattttttgtaattttcattaagcatttaattcacagtcaaatacctgccttacaagatatgcatgctgaaatagctcaaccattattacaagcctaatgttactttgaagtggatttgcatattgaagtggagattccataattatgtcagtgtttaaaggtttcaaattctgggaaaccagttccaaacatttgcagaaaccattaagcagttacatatttaggtatacacacacacacacacacacatacacacacacggaccaaaatacttacacctgcaaaggaataaagatgtgagagtatgtctccattgttcactgtagcatagggatagataagatcctgctttatttggacttggcgcagataatgtatatatttagcaactttgcactatgtaaagtaccttatgtattgcactttaaatttctctcctgatgggtactttaatttgaaatgcactttatgcacagttatgtcttataacttgattgaaaatgacaactttttgcacccatgtcacagaatacttgttacgcattgttcaaactgaaggaaatttctaataatcccgaataatgaacgtagaaatctatctccataaattgagagaagaagaaggtgataagtgttgaaaattaaatgtgataacctttgaaccttgaattttggagatgtattcccaacagcagaatgcaactgtgggcatttcttgtcttatttctttccagagaacgtggttttcatttatttttccctcaaaagagagtcaaatactgacagattcgttctaaatatattgtttctgtcataaaattattgtgatttcctgatgagtcatattactgtgattttcataataatgaagacaccatgaatatactttttttctatatagttcagcaatggcctgaatagaagcaaccaggcaccatctcagcaatgttttctcttgtttgtaattatttgctcctttgaaaattaaatcactattaattacattaaaaatcaaattggataaaacaatgttttctttctggtagcgcataataacagagcacaagcatcttttagatttgagcatttgaagattcaaagttgcgaaagagcacaaaccatattaggtaaaatattggccactcgatccttgaaaagaactgtgtggagcctggaaaaaaaaattaggaccacatgtgagatgtttacaagacacccagaacagtggtaaagtgtgcatactagaaaaagcagcaaaataactctttgtggtaacaggtatcaaaacacgggagccgagatgatatagctctgtttcaagaaatatgtgaatacccacctaccaggtgctcagtggaatcaaagatgaatccaagttcacaaatagacttctacttccaaggtagtacttttgacctgcctggtcatctcagtcttttccattccaacaacctaaggctgtgctttagatttctaagtaatcaagaagtttgggagaggcatagtattacatgtggcttcttagaggaaagaggaagccctgaaaagaaagactttccttgaagaaaatagcattttacagacacatggatagtactgtgatttcatgtatatatatgtaccaattggctaatgagtaggtaaaattgtattactattccagaaagaaaggacaaatgggatgtgaagaactaaagtgacatagttaaaaatttaaccaaatttaagtgcttcctaaaatttggtgaatgtcttattttttaaaatgataataccaataaggaatgttggcacataattcccatttcattataaaacctcttaatagaatagaatcaaataattggaaatggcctatagattaaaaagctgagaaagtatatggtaggtagcaaactccccagaagtatgaactctggattagacatctcagaatacatgagcactcatgttggcttgctttgtagctatgaacttaccctgtattattgaaatgtcagcataatgactggaaggtgaaattggtccattttagagcattactattatgctatctgtccatttaaattaataattgcattaaattcattttagaaggtgctattacattagtagtaagaaagtaaattcatatataaatatttgattatcagatggtttacttacagatacttattttcctgtaaaataggagagtttacctgaagaaaaataaaacttttaacttttctgggaaaatcaaaaaaaaaaa

SEQ ID NO: 163 - DNA, 9145 bp, Homo sapiens
gacttgaacgcaactcccaattgcagaaaattggcaacgtctctgaagagcccttgcttttgcctggacccccagcatcatggtttcccatttcatggggtctctcagtgtcctgtgtttccttctgctgcttggattccagttcgtctgcccacagccctccactcaacacaggaaggtcccgcagcggatggcggcggagggcgcccccgaggacgacggcggcggcggcgccccgggagtgtggggcgcctggggcccctggtcggcctgctcgcgtagctgcagcggcggcgtgatggagcagacgcggccctgcctgccccgctcctaccgcctgcgcggcggccagcggcctggcgcccctgcgcgcgccttcgcggaccacgtggtgtcggcggtgcgcacgtcggtgccactgcaccggagccgcgacgagacgccagcgctggccggtacggacgccagccgccagggccccacggtgctgcgaggcagccggcacccacagccccagggcctcgaagtcactggggacagaaggagcaggacccgtggtaccattggccctggcaagtatggctatggtaaggccccatatatcttaccactgcagacagacactgcacacacgccacagaggctccggagacagaagctctcatcccgccattccaggtcccagggagcatcttctgctaggcatggctacagttcaccagcccaccaggtcccccaacatgggcctttgtaccaaagtgacagtggccctcgctctggactgcaggctgcggaggcccccatctaccagctacctttgacccatgatcaaggctaccctgcagcttcaagtctctttcacagcccagaaacaagcaacaaccacggtgtggggacccatggggcaactcagagcttctctcagcctgcccgatctacagcaatctcatgcatcggggcctatcggcagtacaagctgtgcaacaccaacgtatgtccagaaagcagtagaagtatccgggaggtacagtgtgcatcctacaacaacaagccattcatgggccggttttatgagtgggaaccatttgcagaagtaaaaggcaatcgcaaatgtgagttgaactgccaggcaatgggctaccgcttctatgtacggcaagctgagaaagtcatcgatggcaccccctgtgaccagaacggcacggccatctgtgtgtctgggcagtgcaagagcattggctgtgatgactacttaggctccgacaaagtcgtggacaaatgtggggtgtgtggaggagacaacacgggctgtcaggttgtgtcgggcgtgtttaagcatgccctcaccagcctgggctaccaccgcgtcgtggagattcccgagggagccacgaaaatcaacatcacggagatgtacaagagcaacaactatttggccctgagaagtcgttctggacgctccatcatcaatgggaactgggcaattgatcgaccaggaaaatacgagggcggagggaccatgttcacctacaagcgtccaaatgagatttcgagcactgccggagagtcctttttggcggaaggtcccaccaacgagatcttggatgtctacatgatacaccagcagccaaacccaggcgtgcactacgagtacgtgatcatggggaccaacgccatcagcccccaggtgccaccccacaggagaccaggggaacccttcaatggccagatggtgacagaaggcaggagccaggaggagggagaacagaaagggaggaacgaggagaaggaagacttgcgtggggaggcccctgagatgttcacctcagaatcggcacagaccttcccagtcaggcatccagacagattttctccccatcgaccggacaacttggtgccaccagcaccgcagcccccacggcgcagccgggatcacaactggaagcagcttgggacaacagaatgttccacgacctgtgggaaaggatcgcagtaccctattttccgctgtgtgcacagaagcactcatgaagaggctcctgagagttactgtgactccagcatgaagccgacccccgaggaggagccctgcaacatcttcccttgcccagccttctgggacatcggggagtggtctgagtgcagcaagacctgtggcctgggcatgcagcaccgccaggttctgtgccgccaggtgtacgccaaccgcagcctgacggtgcagccctaccgctgccagcacctggagaaacctgagaccaccagcacctgccaactcaagatctgcagcgagtggcagatccggaccgactggacctcgtgctcggtgccctgcggcgtgggacagaggacccgtgatgtgaagtgtgtgagcaacattggggatgtggttgacgatgaggaatgcaacatgaagctccggccgaatgacattgagaactgcgacatgggaccctgtgccaagagctggttcctcaccgagtggagcgaaaggtgctcagcggagtgtggggccggagtgcggacacgctcggtggtgtgcatgaccaaccatgtcagcagcctgcccctggagggctgtgggaacaaccggccggcagaggccaccccatgtgacaacggaccctgcacgggcaaggtggagtggtttgccgggagctggagtcagtgttccatcgagtgtgggagcgggacgcaacagagggaggtgatttgtgttagaaagaatgcagacacctttgaagtgttggacccctctgaatgttctttcctggagaaaccccccagccagcaatcctgccacctcaagccttgcggagccaaatggtttagcaccgaatggagcatgtgttccaagagctgccagggtggctttcgggtccgggaagtgcggtgtctgtctgatgacatgactctaagtaacctctgtgaccctcagttgaaaccagaagagagagaatcttgtaaccctcaggactgtgtccctgaagttgatgaaaactgcaaggacaagtactacaactgcaacgtggtggtccaggcaagactctgtgtctacaactactacaagaccgcctgctgtgcctcctgcacccgtgtggccaacaggcagacgggcttcctggggagcagataacactcctgcacccccatcagtagggcagcatcactgccttcccgggggcttcagcagtgcgcctggctggctgctgctccaccacgggccccctggcccaggcgctgccaaccaacttagtcaccacccctgcctccggtgaatgcaccccgtggtacccaggggctttttacacaagatgtttgaaagccacagtcagtcctttaagcatcaccatgtactgatgatcccctccttggacctggcatctgctaatggtgccctttgaaagtcaagcagtgggaagtacatggagctctcagccctgctcccatctggcaccttcaagtcagcagatgggccactgactgagcactgccccgtccctggtgctactggtctttctaaacttagcaccctggagagtccaaggaggcagcgcccccaacccagcgccccactaagccttgctgacacgcgtgcatccctctgtgacctcagcccagatgtgcctgttttcattctcaaagacattagactgttttcctgccctatgacacagatagctcacatgaatattgtgctttatttagcaggtgtactcacagatactagctccttagcagctcacaacatcccagaatgggaggcagggggtgactcattatccccattttactgacagggaaactgaggctcaacttaagtaattgacctgccaggtatattcacccatccagtggaagagctgagtccccgccccagtcatctaccagtatccagcctggggcctgtacttagatgtgaaaggtgctgcttcatttctgaccaagagactgagaagtttcccagaatgcaaacaaagcccaggcccctgaaatctttccggtcaagcctttatcccagcactcagttgttttggatgtctgttcctacttgcccttacccccaaagttacagatcctagttacaggactctgccagctttgttaaactgtccgtgagacaagaaagccattggggaaaccaggtgattgcctgaaattcttactccgttccaagtgctgttcctcccaggaaatcaaaggccagggtccttatggccgtggagccttcccgaccacagagccaacttgtgaagcacacagctctgcagcctgggctctgccctgcctcagccgcctcccccacgctcttcaccacgttcctggagagtccggccaacctgtcccagccgaaacactgctgtattagaaaaagtctctttctggtctttctggttttgtttatgaatttccctctgtggccacaaattcctcccctcccccatgactcacagtccatatggcccacccccagacttgagcaccaagctctgcattaatgcagttggcctgcgacaaggagctgtggacccttccccatctcttccaattcactttccccaactatccagttccagaggccgcaggcctggaaggatgcagtgcatattgaaaggtggaccctctgaaaacagttaagaggaatatatgtatgttttacccattaagaaaaaatggcaagctaaacaaatgttaaacttacagaaaatttgtcttatggtcctgagcatatttcccttttagagcaagcctggattcttagcaaagtgtttcccccatttgctcttttagctgacaaatctgccactgtgatgatggtttgcagcttttggaagcagtatggcaacctggcctgacatgctctttaggcttccactaacctggggctttcagaaattctatttggcctttctgtgggtagctttccagcttctcttctagggagccccaggcatcatttcccaaaagcatccccatctcctgattctcttggaactcctacagataagcatcctggcagaggcccaggctcccaaaccgacaaagtgaaaagagaccagagaggccaagcatattgactggtgctgttcagggcctgctcttttccactcaccacttgttttgctgcttgtcacgaggagagttgttcctgtatgtggctgctctcagatctttccaagcaagccagtcatttgaagaggttttcttttcatgctggagggcaggctaagatcaatgagtggaagagagaaaggctgttttagctcaagttaaaggaacaccttctagccatcaaagccgcccaacagaggcaagggccaccacacatgagagagcgctctgtccttaaagggaattctctgttgagtgggaggtgaacaccctggttcttccaactcaggaattctcgtggctgggctgggtcagtgatggctttgtctctttatgtctaaagtgccctatggctgctgaaggttacctaaccattctttaaaaggagaatgaccctccatgggaatggccagcctgccaactgtgcaattgaagaagacccgatggatcaaccccatgtctcccttggggagaaagtgcataaaccaggggtctctttttttttttcaacaaaccattgagctgttcttggagttcatctctggagaggttatacattattagaagtttgattattattatagtttgatcaatttatttgtcttagagatccaatttttactaattccctagttttttatttcagcatctgaatgtctttctccctagcacagtgcatacaatcagggccttgggtatttccagtgataactttccttggagaggatctaagaaaagcccagatttcggtagccatctccctccaaatatgtctctttctgctttcttagtgcccattatttccccctctcctttcttctgtcactgccatctccttcttggtcttcccattgttctttaactggccgtaatgtggaattgatatttacattttgatacggtttttttcttggcctgtgtacgggattgcctcatttcctgctctgaattttaaaattagatattaaagctgtcatatggtttcctcacaaaagtcaacaaagtccaaacaaaaatagtttgccgttttactttcatccattgaaaaaggaaattgtgcctcttgcagcctaggcaaaggacatttagtactatcgattctttccaccctcacgatgacttgcggttctctctgtagaaaagggatggcctaagaaatacaactaaaaaaacaaacaaaaacaccaaaagaaaaaaaaaagccatttaaagccagccactagagggagtcagttcagttccgtaaaggtatgctcagtgcccgctgcctgcaagctgttggggaccccagggagggcaaggcagcctgtccccgcccccagggaactagaacatgacaagaattctccgcactgtgcctacctgtccctttaccttacctctctggcccagagttcttggagggttttttctttattttcttatgtactcatctacttattctcaaagtatttagcattcaacactctttttgctttaaaaagaatggccttacaaagggacagaaaagagaagacacgagcttggtgtattttcatcaagttatgtggcagagaaatccagatattaccaggacctgtctaaacaaatgttgtgggttttcttttcattcggatagccactttatagttggaatatcaattctaatgaggaggaagacataaatataagtggtaaaaagaaacatgacttcccttaaaacaggctggataatctatatcagccttgtgggtggagactagtatttgatccttgccatataaaacattttaatatggtttacatgggaaaatatcgatggcttcctcacaaaatgtatgggtgacgtgaagttgaagagccaatggcttgggtgacacgtgctggatccaaaaagatcagggagactagaataaaacttggatgttaaaaattcaccaggaatccacataaagtactatatttgggctaaaatgaaaaactaaatacaaggtgggagagaggcaagaatttcagttgactaagctcagtgtgagtcaaagtgggatggaaccatgcaaaaacaaaacccacagacatgcaggctacgtgaggagaaaacagtggtgaggatcacatcacattgtgtttgcatttgccggaaccatactttaagaagaaaaccgatcatctataataacatcagtttatcaatgccccgtcctgatgaagtgtgcagactctcagaaacagcaggaaggacttcatgagaaccctcaggctggagaaggcactagggcacaaggagagctctcctaggaccaggaccaagaagctacaggcaggcacagtttagctcctgcagagacccagcttttcacaagttggagccttccagagatagagggactgtggtaggtggtgacccacccatcactggaggtggaagcagaggccgtttgccagggatgctggagaggggattcaagcatctggctgggcaacgtgatgctcagggccgtctccactcagggcttaggggagtctgtgagtagaagagctttaggtgatttgtttggtgggggaaggcaagtacacagctatgcactttccgtttctgacttttgccaccctgtcagccatggggagcccactgtgggactgaaaccctgagctgaatgcggcctcatgtctcagagaaacactggcaagttggtcagagccgccgtctgcatcgaggcgtagctgagcggcaggatggggggctgcctgcccagggtctctcaccgtggtgtaagcagagccatggcttgcctaggaccctatagataccatcactctttctcagctcgactggagtttctgcacctttgcaggggcaaagtaactccctgcaccctgaaccaccccccattcctgttcatttcagcagataatgatggagggggggggtgtccatcgtgctgagggtgtgaccgcaagagggtgaaaacttccagccaactttctcagtcctttctcttgcgagagggaagccacctgctatacaaactaataccccctgccttgaccccttccccacgactcagttgacagaaggatatactttgttataacttattattttgttctctgtaaatacaagatgtttataggaaatatgtattctgaactctatctgcagaatgagtcactacaccaaaatagttctattatttagaatgtgttaattttaaagggacctgataggtatttatttacatatgcgatccacatttgtgtgaaagcatgtgatcatactaacccagcctcctggaatgtcgctgtacgatgattgatgtctttttctcagtccatagttacaattgtttagtatgctaatcagtccagttccctgaggtttaagatcaaatataaattactctgcttttcgactcattcaggtagcattgtacctgaacctgattgctactttttcatcttaaatattatatttcctcatctaatctgccttcccctcatccacagacatttggagaaggaaatgggagggtgtctgttatccctttctctttgctttgtccccgttgttagactggcagcgtcagttgctcggtgggcttggttagagccgtgggtgaggcaggtggctggcggggacagggagaggctgagagggaagtggtggcatttactgctctgacacttccactgtccctgctggggatgctggggccaaggcctgtggggcctgtgaactgcacagccaggagcaaggaacccactaaatactccgtcacctccatgtcccctctacagtgttaaattattacataagcaggtgaaaggtagaaggcgaattatgtgagtaaatatggtctgttttctcttcagcaaaaatgactatttttgtgtgtgactaatttatttttattattgtaaagatacaataaaccggttgaaatatctgctttgttgacaagcgtgtgctttctctggccttattcgcgttctgttctcctgcaaatagcgccctctaaaaagaagagtcagacaataaactggttgaaatatc

SEQ ID NO: 164 - DNA, 3316 bp, Homo sapiens
ggtttttgtgttgctagccggggccagcggcggtggcggcggcggcggaggcgtcggtggaggaggggaggcggcgaggaggcgcagctcccgctgcaccgcgatcgacgctgcggagcgagcccacccgccccgggagctcgcctccccggtgctcccccgccctccccgcccccccagcggcgctgcctcctccaaatgagcgattcgcccgctggatctaacccaaggacacccgaaagcagcggcagcggcagcggcggcggcgggaagaggccggcggtgccggcagcggtgtccctcttgccaccggcggaccccctgcgccaggcgaaccggctcccgatcagggtcctgaagatgctgagcgctcacaccggtcacctcctgcacccggagtacctgcagccgctgtcctccactcccgtcagccccattgagctggacgccaagaagagccccttggcgctgctggctcagacctgctcgcagatcggcaagccggacccgccgccctcctccaaactcaactcggtggcggcggcggccaacgggctgggagcggagaaggaccccggccgctcagccccgggcgccgcctccgcagccgcggccctgaagcagctgggggactcaccggccgaggacaagtccagcttcaagccctactccaagggctccggcggcggcgactcccgcaaagacagcggctcctcctcggtgtcttccacctcctcctcgtcctcctcgtccccgggagacaaggcgggcttcagggtccccagcgccgcctgcccgccctttcccccgcatggagcgccggtctccgcatcctcgtcctcgtcgtcgcccggcggctcccgcggcggctccccgcaccactctgactgcaagaacggcggcggggttggcggcggggagctggacaagaaagaccaggagcccaagcccagcccggagccggcagccgtgagccgcggcggcggtggggagcccggggcgcacggtggcgccgagtccggggcctccgggcgcaagtccgagccgccctcggcgctggtgggggccggccacgtggcgccggtgtctccctacaagccgggccactcggtgttcccgctgccgccctccagcattggctaccacggctccatcgtgggcgcctacgccggctacccgtctcagttcgtgcctggcctggatcctagcaagtccggcctcgtgggaggccagctgtctgggggcctgggcctgccgccgggcaagccccccagctccagcccgctcaccggggcctccccgccctccttcctgcagggattatgccgcgacccctattgcttgggaggttaccacggcgcctcgcacctcggcggctccagctgctccacctgcagcgcgcacgaccctgccgggcccagcctgaaggcggggggctacccgctggtgtaccccgggcacccgctgcagcccgccgcgctctcgtccagcgccgcccaggccgcgctccccggccacccgctctacacctacggcttcatgctgcagaacgaaccgctgccgcacagctgcaactgggtggcagccagtgggccgtgcgacaagcgcttcgccacctcggaggagctgctcagccacctacggacccacacggccctgccgggagccgagaaacttctggccgcctaccccggggcctcgggcctgggcagcgccgccgccgccgccgccgccgccgcctcctgccatctgcacctccccccgcccgccgcccccggcagccccgggtcgctgtccttgcggaatccacacactttgggcctaagccggtaccacccctatggcaagagccacttatccacagcggggggcctggccgtgccgtccctccccacagccggaccctactattcgccatacgcgctgtatggacagagactagcttcagcctcggcgctgggataccagtaactacagctcttcctccaccccagccccctcaccctcctccctctccctcctcctccctccccacctgccgtcgccgctgcaacctccactactgcttgaccctgccgggattccccacccagcccttccccaccggactgtgtatttatttactataatgttagcttacaagctgggaatataagtgcattaacggcccacatgagtcaatggtatgcaaaaagtctgtgttctcccaaataataatattaatcccacaaataacgacatgatccccgcccctgttcctttctgttattttttcttagatataagttttacattttttattccttttcctctttttttggttttgattggtttggtttgagggagagttggggtctttgggttcttctagacgttttgttttcccttcctggggagtttcttgcatgagtcttaacttaaaactacgtttccgccttctctttttccctcttcccccttcattccctcttgtttccttccatttgcggttctgtttttgttttttgttttgttttgttttgttttttcctttgttgtacaagtaacagagaggaggttttttttgtaactcattttgggggtggagggggccacctgggtggcaggggccctggagctctattgacctggtacactgctccgggactcctcccccgccaccctccgcgcatagggtccttggtctggaccctgccccccaaaagtagggccttgctcctctaccttgctctgagcacggagagccctgaccccaccagtaggctcgcccccagaagggcccaagtggccgtctaccgtcaccttccagactcccgcccctaacacccagtggctacagtgcgcctgtcggggcacctggagcgctcacctggttgaattcaaagtcccagaaggccccgctggcgtgaagccggccccttacattttgcgaagtgcattatagtccttgtttttctctccctcgtgggggcaacgacccctcccctggcagtaggggtggggtaggtgactctcgctagatccctccaaagcagaccggtggcgatgtcagcggatgtcacgagctcgttagctgcgttcggggaaggttggggcgtcagggagctctcggatcacagcagcccccgccctctcctaggcctggcccggcagagcccccagagtggaccccccagcgactggggtcttctccccactcctccctccttctggtctgatgcggcagcgcgggggctgcggggcctgtttgggacgaacagagctctcccttggtaagacttattttgttaataaatggaatacttggctatattca

SEQ ID NO: 165 - DNA, 1056 bp, Homo sapiens
gcagaaccagctgtctgagctgcccgggcagcgggggagcagcgagcgggcttccgcgagccggagaaggcacaggcctgtcccgggtcccggcaggtctgcgcgtctgttcccagcgctctgcgaggcctaaaaaggaggagcaacctgtccagaatccctgcaggacaggaaaaggaggggaaatctcgacatggaaaaaccctacaataaaaatgaaggaaacctggaaaacgagggaaagccagaagatgaagtagagcctgatgatgaaggaaagtcagacgaggaagaaaagccagacgtggaggggaagacagaatgcgagggaaagagagaggatgagggagagccaggtgatgagggacaactggaagatgagggaagccaggaaaagcagggcaggtccgaaggtgagggcaagccacaaggcgagggcaagccagcctcccaggcaaagccagagagccagccgcgggccgccgaaaagcgcccggctgaagattatgtgccccggaaagcaaaaagaaaaacggacagggggacggacgattcccccaaggactctcaggaggacttacaggaaaggcatctgagcagtgaggagatgatgagagaatgtggagatgtgtcaagggctcaagaggagctaaggaaaaaacagaaaatgggtggttttcattggatgcaaagagatgtacaggatccattcgccccaaggggacaacggggtgtcaggggagtgaggggtggaggtaggggccagaggggcttacacgatatcccatacctttaatgcctttggccttccattctgatttctctgatgagaatattgctggccctgctttccctggtaggtatttgccaggcccaatgctttaaccttaagctgatactttgctttagatgtcagtctcgttaccagcagccttttgacccaactacggcgctctatattttagtagaggattttcacccatgtgcatggaaaagatgttcatggtacattgtaaaaaaataaaattaaaattaaaaaaagtttgcagaaccgca

SEQ ID NO: 166 - DNA, 3370 bp, Homo sapiens
catttaaagaaacgtccactcaaaaggggttttgccccaagacagtgagcactcaggagactgtgtgtggtgggggtgctccaccatagagctggtcggcatccacagccaccaggacgctgccagagcccaggcctgcgccacgccctgcccagaggcacacctgcctgctcaaggcaaccagggcaggctcaaggcagccagggccagctcactgtgtgcctgtcactgtgtgaagcctgcttcttctttatttcgcttagcaagtgaggcaggagcatgtaaagctgctggcagaggaatatctaatttacctcctaaatggctctactttgaacctgctgggcaaggaagagattttcaaggaaaccatctaccgtgtgcaagctcctgccggccaaccccagaccccagcacggagccaggcgcctgtgcccgccgaccctcagcatcctcctcagaaaggctggtggcatcaggaagcccctggccagcctccacctgagcccagtgagctcagctttaaggatggagtcaggcagggggtcctcaacccctccaggacccattgctgccctagggatgccagacactgggcctggcagttcctccctagggaagcttcaggcgctccctgttgggcccagagcccactgtggggaccctgtcagcctggctgcagcaggggacggctctccagacataggccccacgggagagctgagtggtagcttaaagatccccaaccgggacagcgggatcgacagtccctcctccagtgtggctggagagaactttccctgcgaggagggcttggaggctggcccaagccccactgtactgggggcgcacgcagagatggccctggacagccaggtcccgaaggtcaccccccaggaggaggcggacagcgacgtgggtgaggaacctgactctgagaacaccccccagaaggctgacaaggatgccggcctggcccagcactctggcccccagaagcttctccacattgcccaggagctcctgcacaccgaggagacctatgtgaagcggctgcacctgctggaccaggttttctgcaccaggctgacggatgcggggatccctccagaagtcatcatgggcatattctctaacatctcctccatccaccgcttccacgggcagttcctgctgccggagctgaagacgcggatcacggaggagtgggacacaaacccacggctcggggacatcctgcagaagctggccccattcctgaagatgtacggcgagtatgtcaagaactttgaccgagccgtagggctggtgagcacgtggacccagcgctccccactgtttaaagacgtcgtccacagcatccagaagcaggaggtatgcgggaacctgacgctgcagcaccacatgctggagcccgtgcagagggtcccccggtacgagctgctgctcaaggactatctgaagaggctcccgcaggacgccccagaccggaaggatgcggagaggtccttggagctcatctccacagccgccaaccactccaatgctgccattcggaaagtggagaaaatgcacaagctcttggaggtgtacgagcagctgggtggggaagaagacattgtcaacccggccaatgaactgatcaaggagggccaaatccagaaactgtcagccaagaacggcaccccccaggaccgccacctcttcctgttcaacagcatgatcctttactgtgtgcccaagctgcggctcatgggccagaagttcagcgtccgggagaagatggacatctcaggcctccaggtgcaggatatcgtcaagccaaacacagcacatacattcatcataacaggaagaaaaaggtccctggagctgcagacgcggacagaggaagagaagaaagaatggattcagatcatccaggccaccatcgagaagcacaaacagaacagcgaaaccttcaaggcttttggtggcgccttcagccaggatgaggaccccagcctctctccagacatgcctatcacgagcaccagccctgtggagcctgtggtgaccaccgaaggcagttcgggtgcagcagggctcgagcccagaaaactatcctctaagaccagacgtgacaaggagaagcagagctgtaagagctgtggtgagaccttcaactccatcaccaagaggaggcatcactgcaagctgtgtggggcggtcatctgtgggaagtgctccgagttcaaggccgagaacagccggcagagccgtgtctgcagagattgtttcctgacacagccagtggcccctgagagcacagagaagacacccactgcagacccccagcccagcctgctctgcggccccctgcggctgtcagagagcggtgagacctggagcgaggtgtgggccgccatccccatgtcagatccccaggtgctgcacctgcagggaggcagccaggacggccggctgccccgcaccatccctctccccagctgcaaactgagtgtgccggaccctgaggagaggctggactcggggcatgtgtggaagctgcagtgggccaagcagtcctggtacctgagcgcctcctccgcagagctgcagcagcagtggctggaaaccctaagcactgctgcccatggggacacggcccaggacagcccgggggccctgcagcttcaggtccctatgggcgcagctgctccgtgagctgagtctcccactgccctgcacaccaccacattggacctgtgctgtcctgggaggtggtgttggaggccccatgaagagcgccctggactgctgagggtgggccaacagcccagagctcaggacacttggctttggggggaaggaaactgaggcccagagaggggcaaccactggccaagggtcacccagcaagttttggctaagagcctggcctccagccccagcagtgtggcccagagcaggggccgactgccaaagtaaccatcatccatatgggccgtgtggtgatgctggcccggaaggcagaaagaggcagcatgggcactgccagggacagccacatcctgctggtctgcagcgtggtccaccccgcctctgcccagcctgtctacaccgtgtgagctgaatcgtgacttgcttcccacctcctttctctgtcctctcctgaggttctgcctgcagcccccaggaggtgggcctgccccatcctagctggactcatggttcctaaataaccacgctcagaagctctgctaggacttaccccagccactgagtggcaggcgcatgagatttgtggctgttcctgatgctagtggcacacagtgcttatctgcataaataaacactggccaccagcagtgaaaaaaaaaaaaaaaaa

SEQ ID NO: 167 - DNA, 3190 bp, Homo sapiens
cacagcacatccctttctcctcttttcactcatcgtcaccgctacctgaaaaccctggccgggtgctggggcttgaggagcagttcccacttcccagtctttttcacttttcacagctgcaaagttcagggagttgaactgcagtgctttcagttcactgctcactctgccacgatcaatctctgttgtaaattttcctcccagagcacgtgacgatgcacttcttgactatatatcccaactgcagcagcggagttgtcagagcgcagagccggacagagcagaagaaccctcttggactggacgatttgggaattcaaaacttgggacaaactgtcagccttgcccctgctgtggaggcagcctcaatgctgaaaatggagcctctgaacagcacgcaccccggcaccgccgcctccagcagccccctggagtcccgtgcggccggcggcggcagcggcaatggcaacgagtacttctacattctggttgtcatgtccttctacggcattttcttgatcggaatcatgctgggctacatgaaatccaagaggcgggagaagaagtccagcctcctgctgctgtacaaagacgaggagcggctctggggggaggccatgaagccgctgcctgtggtgtcgggcctgaggtcggtgcaggtgcccctgatgctgaacatgctgcaggagagcgtggcgcccgcgctgtcctgcaccctctgttccatggaaggggacagcgtgagctccgagtcctcctccccggacgtgcacctcaccattcaggaggagggggcagacgatgagctggaggagacctcggagacgcccctcaacgagagcagcgaagggtcctcggagaacatccatcagaattcctagcacccccgggacccctgccggtggctccatcagccagcaaccttagagagaggaaagacagttttcaagtgtctggtttcactttcacagtgcggctgccactttgaagagacccttggtaaacccctgattcggggtggggtgggggactaggctcagccggaaccagcacctccaaggagtccgggaggtgcctgtggtttgcacccaccactgaaaaagccgcggagatgcgcagcgcgtacactgactttggggcctgggtgttggggttctgatcagaatttggcgggatgatatgtttgccattttctcactggatgccctgggtagctcctgcagggtctgcctgttcccagggctgccgaatgcttaggacacgctgagagactagttgtgatttgctattttgcctagagctttgtccttctagatctgattggctgtaagtatctctactgtgtacctgtggcattccttcacagtgggttacaagcttcttttggattagagggggatttttgatgggagaaagctggagatctgaacccagcccatttgcacactataagaaaaaaaagtaacttttaaacctgttaacattggccggggttataagagatgatcttctattttgaccttttgtctaacttatgaccttgaactctgacctgtgaccatgcagcatcacatgatggcatgacgttctttggatcagaagagcttccccagaatctaacctgcactcccgatggtggttcaggagactcttcctgatctttctagaaggggtaaagtggggttgaacaaggccaagccgttagctctgctgctgctcagtttcccagcctagttttctgagctgggagaggacataatgtggtatttcgtcacgtagctgagacctagaagggcatactcaggcggagattgcacaaagctgggctccaagttctgtgcttcctgatcccgagccctgacactcatttgctgtgtggtcccgggcatgtcatcaagaagctcgctgtctgcatgaggctcccgacgatctccatccccagggggttgggaggatgtctttagattttaggactctgtgataaatattccacagcctggtgtgaggaagcttggaccaaatgcttcccctttggccggttagtctgaacaaggatctgctgatttaaaggagcagttggagattcagaacacatataactggggaattcagggcaagctaccaacccagccctgctgtagttttcccaggactgaaggaaagaggcagacaccacattctcctctgcaaagttctctggagaatgtgtgatgttaacactcccagctaagggaaagcaaagtctaaaggaaaacacacaggaatgcttccaatgtctccaagtattcctgtggtcaacagtttcgcagatccgttaggcccttaaagacaaggaggaagtaaaaggtcaaatttaaatctatttaaaaaaacttttaaaaaaattatttatttattattattttttatttttaagacagaatctcgctctgttgcccaggctggagtgcagtggtgcaatcttggctcactgcaacctccacctcctgggtttcagcgattctcctgcctcagcctcctgagtagctgggattacaggcgcctgccaccacgcccagctaattttttgatttttagtagagatggggtttcgccattttggccaggctggtctcaaactcctggccttaaatgatcctcccacctcggcctcccaaagtgctgggattacaggcatgagccactgcacccggccactttttttttttttaaagaaaaatgctctgcatggattggagacacagcaataactactgttgccatggaagggttaacagtgtaggagctggtttatcagtccgctttgacatacagctaaaggaaatttatgtttgggggaaaaaggccctctgttcactttaaaattcagtgtggacttatgccaaagggggctgtttaagttgaaagaagccaagttaagtttggcctcttgcctggaatcacttgaattctgaaatttcactgcgacggacatgtgccttgtcacattttccattgcttaatcctgaagtttggtgcaagtctctctgcacctattaaaaagtgatgtatatacttccttcttattctgttgagttgtatagaattgtcttttgtatttaacactttgtaattttcacaatattttttaatttaaataaataaacacattttttccctcctgggaagtcatgaaaaaaaaaaaaaaaaa

SEQ ID NO: 168 - DNA, 2397 bp, Homo sapiens
gctcctccttcgcggcggtaccgcctctgtttctgcggcgattgaacagccgagctttgcggccgggatcgcggaaagtgatggctgtcgtcccggcgtctctctcaggacaggacgtgggatcatttgcatatcttacaattaaagacagaataccacagatcttaactaaggttattgatacattgcatcgacataaaagtgaattttttgagaaacacggagaggaaggcgtggaagctgaaaagaaagctatctctctcctttctaaattacggaatgaattgcaaacagataaaccatttatccccttggttgagaaatttgttgatactgatatatggaatcagtacctagaatatcaacagagtcttttaaatgaaagtgatggaaaatcaagatggttctactcaccgtggttgttggtagaatgttacatgtatcgaagaattcatgaagcaattatccagagtccaccaatcgattactttgatgtatttaaagaatcaaaagagcaaaatttctatgggtcacaggaatccatcattgctttatgtactcacctgcaacaattgataagaactattgaagacctagatgaaaatcagctgaaagatgagttttttaaacttctgcagatttcactgtggggaaataagtgtgatctgtctctctcaggtggagaaagtagttctcagaataccaatgtactaaattcattggaagacctaaaacctttcattttattgaatgatatggaacatctttggtcattgcttagcaattgcaagaaaacaagagaaaaagcttctgctactagagtgtatattgttctcgataattctggatttgagcttgttacagatttaatattagccgacttcttgttgtcctctgaactggctactgaggttcatttttatggaaaaacaattccatggtttgtttctgatactactatacatgattttaattggttaattgaacaggtaaaacacagtaatcataagtggatgtccaagtgtggggctgactgggaagagtatattaaaatgggtaaatgggtttaccacaatcatatattttggactctgcctcatgagtactgtgcaatgcctcaggttgcacctgacttatatgctgaactacagaaggcacatttaattttattcaagggtgatttgaattacaggaagttgacaggtgacagaaaatgggagttttctgttccatttcatcaggctctgaatggcttccatcctgcaccactctgtaccataagaacattaaaagctgaaattcaggttggtctgcagcctgggcaaggggaacagctcctggcctctgagcccagctggtggaccactggaaaatatggaatatttcagtacgatggtcccctttgacttgatttaggagctctcagttgcatagaaagatctggtgagcaccttttcatccccagaaaaggagcacgtgaattgagtcgcctggcggctctgtacgcgctcagggaagcttagcttcttggtgcccatctacgtgcactggatgatttttcttttgaacattttgccccactacactgttttggggatagctgggttaagcaagttaaagatatttacatttatattggaattttagcaactttttttcaggttaaatatataatttcaagtgcttttaatgaacttatttttaattggctagggagcaaaaaataagtgagttctgcttttagttagttaaccttgttcttttcttaaatagtacactgcatggtatttaatattccaggaagcatgggattttattttgcttgattttgggcacatgaaataatagctctaggaaaatgcgcatcttaatgactctttgtaaagagaggcatttcttacaactgtgatgtttgcttacataaaagttacctcataagttaattctaacttttattcttgaattttatttcatttcaatagcttgtttcatttgcacgcctttgtattttgattgacctgtagaatggatgttaggaaactcaaaattgaacacagtgaaacaaatggtatttgaagaaatgtaatatcttttatattctatttatgatatccataatcaaatgagattattttaccacataaatgttttaaatatcagatttttagtttgcagttttaggaaaatgctttagatagaaaaggttcttatgcattgaatttggagtactaccaacaatgaatgaatttattttttatattcttacacattttattggtcattgtcacagatagtaaatactaaaaatttcaggtcagtttgttttgaaactgaaattggaaataaatctggaaatgttttgttgcactaaaataataaaatgaattgtactgaaaa

SEQ ID NO: 169 - DNA, 2051 bp, Homo sapiens
gagacttcgagagggacttagagaaggcagacgcatcccgaactcgctggaggacaaggctcagctcttgccaggccaaattgagacatgtctgacacaagcgagagtggtgcaggtctaactcgcttccaggctgaagcttcagaaaaggacagtagctcgatgatgcagactctgttgacagtgacccagaatgtggaggtcccagagacaccgaaggcctcaaaggcactggaggtctcagaggatgtgaaggtctcaaaagcctctggggtctcaaaggccacagaggtctcaaagaccccagaggctcgggaggcacctgccacccaggcctcatctactactcagctgactgatacccaggttctggcagctgaaaacaagagtctagcagctgacaccaagaaacagaatgctgacccgcaggctgtgacaatgcctgccactgagaccaaaaaggtcagccatgtggctgatacaaaggtcaatacaaaggctcaggagactgaggctgcaccctctcaggccccagcagatgaacctgagcctgagagtgcagctgcccagtctcaggagaatcaggatactcggcccaaggtcaaagccaagaaagcccgaaaggtgaagcatctggatggggaagaggatggcagcagtgatcagagtcaggcttctggaaccacaggtggccgaagggtctcaaaggccctaatggcctcaatggcccgcagggcttcaaggggtcccatagccttttgggcccgcagggcatcaaggactcggttggctgcttgggcccggagagccttgctctccctgagatcacctaaagcccgtaggggcaaggctcgccgtagagctgccaagctccagtcatcccaagagcctgaagcaccaccacctcgggatgtggcccttttgcaagggagggcaaatgatttggtgaagtaccttttggctaaagaccagacgaagattcccatcaagcgctcggacatgctgaaggacatcatcaaagaatacactgatgtgtaccccgaaatcattgaacgagcaggctattccttggagaaggtatttgggattcaattgaaggaaattgataagaatgaccacttgtacattcttctcagcaccttagagcccactgatgcaggcatactgggaacgactaaggactcacccaagctgggtctgctcatggtgcttcttagcatcatcttcatgaatggaaatcggtccagtgaggctgtcatctgggaggtgctgcgcaagttggggctgcgccctgggatacatcattcactctttggggacgtgaagaagctcatcactgatgagtttgtgaagcagaagtacctggactatgccagagtccccaatagcaatccccctgaatatgagttcttctggggcctgcgctcttactatgagaccagcaagatgaaagtcctcaagtttgcctgcaaggtacaaaagaaggatcccaaggaatgggcagctcagtaccgagaggcgatggaagcggatttgaaggctgcagctgaggctgcagctgaagccaaggctagggccgagattagagctcgaatgggcattgggctcggctcggagaatgctgccgggccctgcaactgggacgaagctgatatcggaccctgggccaaagcccggatccaggcgggagcagaagctaaagccaaagcccaagagagtggcagtgccagcactggtgccagtaccagtaccaataacagtgccagtgccagtgccagcaccagtggtggcttcagtgctggtgccagcctgaccgccactctcacatttgggctcttcgctggccttggtggagctggtgccagcaccagtggcagctctggtgcctgtggtttctcctacaagtgagattttagatattgttaatcctgccagtctttctcttcaagccagggtgcatcctcagaaacctactcaacacagcactctaggcagccactatcaatcaattgaagttgacactctgcattaaatctatttgccatttctga

SEQ ID NO: 170 - DNA, 11499 bp, Homo sapiens
aagcgcaccgcccaggcagcagccggccgccggggtctgcgcggcgcggagctgcccagcccgctccgggaactcagcccccgccccgcgccgggcccgccccgcttcccacgcccgtccggccgagcccgcgccggagccacctggagccgcctggagccgccgccgccgccgcaggttgatgcgcggcgccctcccgggacgcgcggaggagccatcttgaaaccaacttcgcaaactttcgcaaagtgctctcgaagtggaagctgcgggggaggccgggcgcgtggtccccacagtccccgccagggcccccggggaggcgggacgcggaccgccccgagggccgggcgcccgggagccgctccccggcctcgccgggtggatgcggaggcgcgccgggtgcatggattgtgttcgggcgcccggctcgggctcgggctccgggccatggcgccgccgccgccgcccgtgctgcccgtgctgctgctcctggccgccgccgccgccctgccggcgatggggctgcgagcggccgcctgggagccgcgcgtacccggcgggacccgcgccttcgccctccggcccggctgtacctacgcggtgggcgccgcttgcacgccccgggcgccgcgggagctgctggacgtgggccgcgatgggcggctggcaggacgtcggcgcgtctcgggcgcggggcgcccgctgccgctgcaagtccgcttggtggcccgcagtgccccgacggcgctgagccgccgcctgcgggcgcgcacgcaccttcccggctgcggagcccgtgcccggctctgcggaaccggtgcccggctctgcggggcgctctgcttccccgtccccggcggctgcgcggccgcgcagcattcggcgctcgcagctccgaccaccttacccgcctgccgctgcccgccgcgccccaggccccgctgtcccggccgtcccatctgcctgccgccgggcggctcggtccgcctgcgtctgctgtgcgccctgcggcgcgcggctggcgccgtccgggtgggactggcgctggaggccgccaccgcggggacgccctccgcgtcgccatccccatcgccgcccctgccgccgaacttgcccgaagcccgggcggggccggcgcgacgggcccggcggggcacgagcggcagagggagcctgaagtttccgatgcccaactaccaggtggcgttgtttgagaacgaaccggcgggcaccctcatcctccagctgcacgcgcactacaccatcgagggcgaggaggagcgcgtgagctattacatggaggggctgttcgacgagcgctcccggggctacttccgaatcgactctgccacgggcgccgtgagcacggacagcgtactggaccgcgagaccaaggagacgcacgtcctcagggtgaaagccgtggactacagtacgccgccgcgctcggccaccacctacatcactgtcttggtcaaagacaccaacgaccacagcccggtcttcgagcagtcggagtaccgcgagcgcgtgcgggagaacctggaggtgggctacgaggtgctgaccatccgcgccagcgaccgcgactcgcccatcaacgccaacttgcgttaccgcgtgttggggggcgcgtgggacgtcttccagctcaacgagagctctggcgtggtgagcacacgggcggtgctggaccgggaggaggcggccgagtaccagctcctggtggaggccaacgaccaggggcgcaatccgggcccgctcagtgccacggccaccgtgtacatcgaggtggaggacgagaacgacaactacccccagttcagcgagcagaactacgtggtccaggtgcccgaggacgtggggctcaacacggctgtgctgcgagtgcaggccacggaccgggaccagggccagaacgcggccattcactacagcatcctcagcgggaacgtggccggccagttctacctgcactcgctgagcgggatcctggatgtgatcaaccccttggatttcgaggatgtccagaaatactcgctgagcattaaggcccaggatgggggccggcccccgctcatcaattcttcaggggtggtgtctgtgcaggtgctggatgtcaacgacaacgagcctatctttgtgagcagccccttccaggccacggtgctggagaatgtgcccctgggctaccccgtggtgcacattcaggcggtggacgcggactctggagagaacgcccggctgcactatcgcctggtggacacggcctccacctttctggggggcggcagcgctgggcctaagaatcctgcccccacccctgacttccccttccagatccacaacagctccggttggatcacagtgtgtgccgagctggaccgcgaggaggtggagcactacagcttcggggtggaggcggtggaccacggctcgccccccatgagctcctccaccagcgtgtccatcacggtgctggacgtgaatgacaacgacccggtgttcacgcagcccacctacgagcttcgtctgaatgaggatgcggccgtggggagcagcgtgctgaccctgcaggcccgcgaccgtgacgccaacagtgtgattacctaccagctcacaggcggcaacacccggaaccgctttgcactcagcagccagagagggggcggcctcatcaccctggcgctacctctggactacaagcaggagcagcagtacgtgctggcggtgacagcatccgacggcacacggtcgcacactgcgcatgtcctaatcaacgtcactgatgccaacacccacaggcctgtctttcagagctcccattacacagtgagtgtcagtgaggacaggcctgtgggcacctccattgctaccctcagtgccaacgatgaggacacaggagagaatgcccgcatcacctacgtgattcaggaccccgtgccgcagttccgcattgaccccgacagtggcaccatgtacaccatgatggagctggactatgagaaccaggtcgcctacacgctgaccatcatggcccaggacaacggcatcccgcagaaatcagacaccaccaccctagagatcctcatcctcgatgccaatgacaatgcaccccagttcctgtgggatttctaccagggttccatctttgaggatgctccaccctcgaccagcatcctccaggtctctgccacggaccgggactcaggtcccaatgggcgtctgctgtacaccttccagggtggggacgacggcgatggggacttctacatcgagcccacgtccggtgtgattcgcacccagcgccggctggaccgggagaatgtggccgtgtacaacctttgggctctggctgtggatcggggcagtcccactccccttagcgcctcggtagaaatccaggtgaccatcttggacattaatgacaatgcccccatgtttgagaaggacgaactggagctgtttgttgaggagaacaacccagtggggtcggtggtggcaaagattcgtgctaacgaccctgatgaaggccctaatgcccagatcatgtatcagattgtggaaggggacatgcggcatttcttccagctggacctgctcaacggggacctgcgtgccatggtggagctggactttgaggtccggcgggagtatgtgctggtggtgcaggccacgtcggctccgctggtgagccgagccacggtgcacatccttctcgtggaccagaatgacaacccgcctgtgctgcccgacttccagatcctcttcaacaactatgtcaccaacaagtccaacagtttccccaccggcgtgatcggctgcatcccggcccatgaccccgacgtgtcagacagcctcaactacaccttcgtgcagggcaacgagctgcgcctgttgctgctggaccccgccacgggcgaactgcagctcagccgcgacctggacaacaaccggccgctggaggcgctcatggaggtgtctgtgtctgatggcatccacagcgtcacggccttctgcaccctgcgtgtcaccatcatcacggacgacatgctgaccaacagcatcactgtccgcctggagaacatgtcccaggagaagttcctgtccccgctgctggccctcttcgtggagggggtggccgccgtgctgtccaccaccaaggacgacgtcttcgtcttcaacgtccagaacgacaccgacgtcagctccaacatcctgaacgtgaccttctcggcgctgctgcctggcggcgtccgcggccagttcttcccgtcggaggacctgcaggagcagatctacctgaatcggacgctgctgaccaccatctccacgcagcgcgtgctgcccttcgacgacaacatctgcctgcgcgagccctgcgagaactacatgaagtgcgtgtccgttctgcgattcgacagctccgcgcccttcctcagctccaccaccgtgctcttccggcccatccaccccatcaacggcctgcgctgccgctgcccgcccggcttcaccggcgactactgcgagacggagatcgacctctgctactccgacccgtgcggcgccaacggccgctgccgcagccgcgagggcggctacacctgcgagtgcttcgaggacttcactggagagcactgtgaggtggatgcccgctcaggccgctgtgccaacggggtgtgcaagaacgggggcacctgcgtgaacctgctcatcggcggcttccactgcgtgtgtcctcctggcgagtatgagaggccctactgtgaggtgaccaccaggagcttcccgccccagtccttcgtcaccttccggggcctgagacagcgcttccacttcaccatctccctcacgtttgccactcaggaaaggaacggcttgcttctctacaacggccgcttcaatgagaagcacgacttcatcgccctggagatcgtggacgagcaggtgcagctcaccttctctgcaggcgagacaacaacgaccgtggcaccgaaggttcccagtggtgtgagtgacgggcggtggcactctgtgcaggtgcagtactacaacaagcccaatattggccacctgggcctgccccatgggccgtccggggaaaagatggccgtggtgacagtggatgattgtgacacaaccatggctgtgcgctttggaaaggacatcgggaactacagctgcgctgcccagggcactcagaccggctccaagaagtccctggatctgaccggccctctactcctggggggtgtccccaacctgccagaagacttcccagtgcacaaccggcagttcgtgggctgcatgcggaacctgtcagtcgacggcaaaaatgtggacatggccggattcatcgccaacaatggcacccgggaaggctgcgctgctcggaggaacttctgcgatgggaggcggtgtcagaatggaggcacctgtgtcaacaggtggaatatgtatctgtgtgagtgtccactccgattcggcgggaagaactgtgagcaagccatgcctcacccccagctcttcagcggtgagagcgtcgtgtcctggagtgacctgaacatcatcatctctgtgccctggtacctggggctcatgttccggacccggaaggaggacagcgttctgatggaggccaccagtggtgggcccaccagctttcgcctccagatcctgaacaactacctccagtttgaggtgtcccacggcccctccgatgtggagtccgtgatgctgtccgggttgcgggtgaccgacggggagtggcaccacctgctgatcgagctgaagaatgttaaggaggacagtgagatgaagcacctggtcaccatgaccttggactatgggatggaccagaacaaggcagatatcgggggcatgcttcccgggctgacggtaaggagcgtggtggtcggaggcgcctctgaagacaaggtctccgtgcgccgtggattccgaggctgcatgcagggagtgaggatgggggggacgcccaccaacgtcgccaccctgaacatgaacaacgcactcaaggtcagggtgaaggacggctgtgatgtggacgacccctgtacctcgagcccctgtccccccaatagccgctgccacgacgcctgggaggactacagctgcgtctgtgacaaagggtaccttggaataaactgtgtggatgcctgtcacctgaacccctgcgagaacatgggggcctgcgtgcgctcccccggctccccgcagggctacgtgtgcgagtgtgggcccagtcactacgggccgtactgtgagaacaaactcgaccttccgtgccccagaggctggtgggggaaccccgtctgtggaccctgccactgtgccgtcagcaaaggctttgatcccgactgtaataagaccaacggccagtgccaatgcaaggagaattactacaagctcctagcccaggacacctgtctgccctgcgactgcttcccccatggctcccacagccgcacttgcgacatggccaccgggcagtgtgcctgcaagcccggcgtcatcggccgccagtgcaaccgctgcgacaacccgtttgccgaggtcaccacgctcggctgtgaagtgatctacaatggctgtcccaaagcatttgaggccggcatctggtggccacagaccaagttcgggcagccggctgcggtgccatgccctaagggatccgttggaaatgcggtccgacactgcagcggggagaagggctggctgcccccagagctctttaactgtaccaccatctccttcgtggacctcagggccatgaatgagaagctgagccgcaatgagacgcaggtggacggcgccagggccctgcagctggtgagggcgctgcgcagtgctacacagcacacgggcacgctctttggcaatgacgtgcgcacggcctaccagctgctgggccacgtccttcagcacgagagctggcagcagggcttcgacctggcagccacgcaggacgccgactttcacgaggacgtcatccactcgggcagcgccctcctggccccagccaccagggcggcgtgggagcagatccagcggagcgagggcggcacggcacagctgctccggcgcctcgagggctacttcagcaacgtggcacgcaacgtgcggcggacgtacctgcggcccttcgtcatcgtcaccgccaacatgattcttgctgtcgacatctttgacaagttcaactttacgggagccagggtcccgcgattcgacaccatccatgaagagttccccagggagctggagtcctccgtctccttcccagccgacttcttcagaccacctgaagaaaaagaaggccccctgctgaggccggctggccggaggaccaccccgcagaccacgcgcccggggcctggcaccgagagggaggccccgatcagcaggcggaggcgacaccctgatgacgctggccagttcgccgtcgctctggtcatcatttaccgcaccctggggcagctcctgcccgagcgctacgaccccgaccgtcgcagcctccggttgcctcaccggcccatcattaataccccgatggtgagcacgctggtgtacagcgagggggctccgctcccgagacccctggagaggcccgtcctggtggagttcgccctgctggaggtggaggagcgaaccaagcctgtctgcgtgttctggaaccactccctggccgttggtgggacgggagggtggtctgcccggggctgcgagctcctgtccaggaaccggacacatgtcgcctgccagtgcagccacacagccagctttgcggtgctcatggatatctccaggcgtgagaacggggaggtcctgcctctgaagattgtcacctatgccgctgtgtccttgtcactggcagccctgctggtggccttcgtcctcctgagcctggtccgcatgctgcgctccaacctgcacagcattcacaagcacctcgccgtggcgctcttcctctctcagctggtgttcgtgattgggatcaaccagacggaaaacccgtttctgtgcacagtggttgccatcctcctccactacatctacatgagcacctttgcctggaccctcgtggagagcctgcatgtctaccgcatgctgaccgaggtgcgcaacatcgacacggggcccatgcggttctactacgtcgtgggctggggcatcccggccattgtcacaggactggcggtcggcctggacccccagggctacgggaaccccgacttctgctggctgtcgcttcaagacaccctgatttggagctttgcggggcccatcggagctgttataatcatcaacacagtcacttctgtcctatctgcaaaggtttcctgccaaagaaagcaccattattatgggaaaaaagggatcgtctccctgctgaggaccgcattcctcctgctgctgctcatcagcgccacctggctgctggggctgctggctgtgaaccgcgatgcactgagctttcactacctcttcgccatcttcagcggcttacagggccccttcgtcctccttttccactgcgtgctcaaccaggaggtccggaagcacctgaagggcgtgctcggcgggaggaagctgcacctggaggactccgccaccaccagggccaccctgctgacgcgctccctcaactgcaacaccaccttcggtgacgggcctgacatgctgcgcacagacttgggcgagtccaccgcctcgctggacagcatcgtcagggatgaagggatccagaagctcggcgtgtcctctgggctggtgaggggcagccacggagagccagacgcgtccctcatgcccaggagctgcaaggatccccctggccacgattccgactcagatagcgagctgtccctggatgagcagagcagctcttacgcctcctcacactcgtcagacagcgaggacgatggggtgggagctgaggaaaaatgggacccggccaggggcgccgtccacagcacccccaaaggggacgctgtggccaaccacgttccggccggctggcccgaccagagcctggctgagagtgacagtgaggaccccagcggcaagccccgcctgaaggtggagaccaaggtcagcgtggagctgcaccgcgaggagcagggcagtcaccgtggagagtaccccccggaccaggagagcgggggcgcagccaggcttgctagcagccagcccccagagcagaggaaaggcatcttgaaaaataaagtcacctacccgccgccgctgacgctgacggagcagacgctgaagggccggctccgggagaagctggccgactgtgagcagagccccacatcctcgcgcacgtcttccctgggctctggcggccccgactgcgccatcacagtcaagagccctgggagggagccggggcgtgaccacctcaacggggtggccatgaatgtgcgcactgggagcgcccaggccgatggctccgactctgagaaaccgtgaggcaagcccgtcaccccacacaggctgcggcatcaccctcagaccttggagcccaaggggccactgcccttgaagtggagtgggcccagagtgtggcggtccccatggtggcagccccccgactgatcatccagacacaaaggtcttggttctcccaggagctcagggcctgtcagacctggtgacaagtgccaaaggccacaggcatgagggaggcgtggaccactgggccagcaccgctgagtcctaagactgcagtcaaagccagaactgagaggggaccccagactgggcccagaggctggccagagttcaggaacgccgggcacagaccaaagaccgcggtccagccccgcccaggcgggcatctcatggcagtgcggacccgtggctggcagcccgggcagtcctttgcaaaggcaccccttgtcttaaaatcacttcgctatgtgggaaaggtggagatacttttatatatttgtatgggactctgaggaggtgcaacctgtatatatattgcattcgtgctgactttgttatcccgagagatccatgcaatgatctcttgctgtcttctctgtcaagattgcacagttgtacttgaatctggcatgtgttgacgaaactggtgccccagcagatcaaaggtgggaaatacgtcagcagtggggctaaaaccaagcggctagaagccctacagctgccttcggccaggaagtgaggatggtgtgggccctccccgccggccccctgggtccccagtgttcgctgtgtgtgcgtttgtcctctgctgccatctgccccggctgtgtgaattcaagacagggcagtgcagcactaggcaggtgtgaggagccctgctgaggtcactgtggggcacggttgccacacggctgtcatttttcacctggtcattctgtgaccaccaccccctcccctcaccgcctcccaggtggcccgggagctgcaggtggggatggctttgtcctttgctcctgctccccgtgggacctgggaccttaaagcgttgcaggttcctgatttggacagaggtgtggggccttccaggccgttacatacctcctgccaattctctaactctctgagactgcgaggatctccaggcagggttctcccctctggagtctgaccaattacttcattttgcttcaaatggccaattgtgcagagggacaaagccacagccacactcttcaacggttaccaaactgtttttggaaattcacaccaaggtcgggcccactgcaggcagctggcacagcgtggcccgaggggctgtggaacgggtcccggaactgtcagacatgtttgattttagcgtttcctttgttcttcaaatcaggtgcccaaataagtgatcagcacagctgcttccaaataggagaaaccataaaataggatgaaaatcaagtaaaatgcaaagatgtccacactgttttaaacttgaccctgatgaaaatgtgagcactgttagcagatgcctatgggagaggaaaagcgtatctgaaaatggtccaggacaggaggatgaaatgagatcccagagtcctcacacctgaatgaattatacatgtgccttaccaggtgagtggtctttcgaagataaaaaactctagtccctttaaacgtttgcccctggcgtttcctaagtacgaaaaggtttttaagtcttcgaacagtctcctttcatgactttaacaggattctgccccctgaggtgtaatttttttgttctatttttttccacgtactccacagccaacatcacgaggtgtaatttttaatttgatcagaactgttaccaaaaaacaactgtcagttttattgagatgggaaaaatgtaaacctatttttattacttaagactttatgggagagattagacactggaggtttttaacagaacgtgtatttattaatgttcaaaacactggaattacaaatgagaagagtctacaataaattaagatttttgaatttgta

SEQ ID NO: 171 - DNA, 2303 bp, Homo sapiens
caggttgaaatggctgatgacatcactggttcccgggagcggtagagctggagccggagccaagggagtccaggctgccgggggctgcagacatggagggccagagcagcaggggcagcaggaggccagggacccgggctggcctgggttccctgcccatgccccagggtgttgcccaaactggggcaccctccaaggtggactcaagttttcagctcccagcaaagaagaacgcagccctaggaccctcggaaccaaggatcactgtggtcacatggaacgtgggcactgccatgcccccagacgatgtcacatccctcctccacctgggcggtggtgacgacagcgacggcgcagacatgatcgccatagggttgcaggaagtgaactccatgctcaacaagcgactcaaggacgccctcttcacggaccagtggagtgagctgttcatggatgcgctagggcccttcaacttcgtgctggtgagttcggtgaggatgcagggtgtcatcctgctgctgttcgccaagtactaccacctgcccttcctgcgagacgtgcagaccgactgcacgcgcactggcctgggcggctactggggtaacaagggtggcgtgagcgtgcgcctggcggccttcgggcacatgctctgcttcctgaactgccacttgcctgcgcatatggacaaggcggagcagcgcaaagacaacttccagaccatcctcagcctccagcagttccaagggccgggcgcacagggcatcctggatcatgacctcgtgttctggttcggggacctgaacttccgcattgagagctatgacctgcactttgtcaagtttgccatcgacagtgaccagctccatcagctctgggagaaggaccagctcaacatggccaagaacacctggcccattctgaagggctttcaggaggggcccctcaacttcgctcccaccttcaagtttgatgtgggtaccaacaaatacgataccagtgccaagaaacggaagccagcttggacagaccgtatcctatggaaggtcaaggctccaggtgggggtcccagcccctcaggacggaagagccaccgactccaggtgacgcagcacagctaccgcagccacatggaatacacagtcagcgaccacaagcctgtggctgcccagttcctcctgcagtttgccttcagggacgacatgccactggtgcggctggaggtggcagatgagtgggtgcggcccgagcaggcggtggtgaggtaccgcatggaaacagtgttcgcccgcagctcctgggactggatcggcttataccgggtgggtttccgccattgcaaggactatgtggcttatgtctgggccaaacatgaagatgtggatgggaatacctaccaggtaacattcagtgaggaatcactgcccaagggccatggagacttcatcctgggctactatagtcacaaccacagcatcctcatcggcatcactgaacccttccagatctcgctgccttcctcggagttggccagcagcagcacagacagctcaggcaccagctcagagggagaggatgacagcacactggagctccttgcacccaagtcccgcagccccagtcctggcaagtccaagcgacaccgcagccgcagcccgggactggccaggttccctgggcttgccctacggccctcatcccgtgaacgccgtggtgccagccgtagcccctcaccccagagccgccgcctgtcccgagtggctcctgacaggagcagtaatggcagcagccggggcagtagtgaagaggggccctctgggttgcctggcccctgggccttcccaccagctgtgcctcgaagcctgggcctgttgcccgccttgcgcctagagactgtagaccctggtggtggtggctcctggggacctgatcgggaggccctggcgcccaacagcctgtctcctagtccccagggccatcgggggctggaggaagggggcctggggccctgagggtggggtaggcagatgggccaaggtgaccaccattctgcctcaatcttttgcaagcccacctgcctctctcctgctgctcctccagctgtatctgcacctgcctctctgtcctggccaggggtggacaactggggtcccccaaaactcagtcctggcacctcaactgtgacaatcagcaaagccccacccaggcccccatctgggatgatgggagagctctggcagatgtcccaatcctggaggtcatccattaggaattaaattctccagcctcaaaaaaaaaaaaaaaaa

SEQ ID NO: 172 - DNA, 4361 bp, Homo sapiens
aggctgctggagaaggcgcacctgctgcaggtgctcccggccgccccggaccagcgagcgcgggcactgcggcggggaggatgctgcgcgagcggaccgtgcggctgcagtacgggagccgcgtggaggcggtgtacgtgctgggcacctacctctggaccgatgtctacagcgcggccccagccggggcccaaaccttcagcctgaagcactcggaacacgtgtgggtggaggtggtgcgtgatggggaggctgaggaggtggccaccaatggcaagcagcgctggcttctctcgcccagcaccaccctgcgggtcaccatgagccaggcgagcaccgaggccagcagtgacaaggtcaccgtcaactactatgacgaggaagggagcattcccatcgaccaggcggggctcttcctcacagccattgagatctccctggatgtggacgcagaccgggatggtgtggtggagaagaacaacccaaagaaggcatcctggacctggggccccgagggccagggggccatcctgctggtgaactgtgaccgagagacaccctggttgcccaaggaggactgccgtgatgagaaggtctacagcaaggaagatctcaaggacatgtcccagatgatcctgcggaccaaaggccccgaccgcctccccgccggatacgagatagttctgtacatttccatgtcagactcagacaaagtgggcgtgttctacgtggagaacccgttcttcggccaacgctatatccacatcctgggccggcggaagctctaccatgtggtcaagtacacgggtggctccgcggagctgctgttcttcgtggaaggcctctgtttccccgacgagggcttctcaggcctggtctccatccatgtcagcctgctggagtacatggcccaggacattcccctgactcccatcttcacggacaccgtgatattccggattgctccgtggatcatgacccccaacatcctgcctcccgtgtcggtgtttgtgtgctgcatgaaggataattacctgttcctgaaagaggtgaagaaccttgtggagaaaaccaactgtgagctgaaggtctgcttccagtacctaaaccgaggcgatcgctggatccaggatgaaattgagtttggctacatcgaggccccccataaaggcttccccgtggtgctggactctccccgagatggaaacctaaaggacttccctgtgaaggagctcctgggcccagattttggctacgtgacccgggagcccctctttgagtctgtcaccagccttgactcatttggaaacctggaggtcagtcccccagtgaccgtgaacggcaagacatacccgcttggccgcatcctcatcgggagcagctttcctctgtctggtggtcggaggatgaccaaggtggtgcgtgacttcctgaaggcccagcaggtgcaggcgcccgtggagctctactcagactggctgactgtgggccacgtggatgagttcatgtcctttgtccccatccccggcacaaagaaattcctgctactcatggccagcacctcggcctgctacaagctcttccgagagaagcagaaggacggccatggagaggccatcatgttcaaaggcttgggtgggatgagcagcaagcgaatcaccatcaacaagattctgtccaacgagagccttgtgcaggagaacctgtacttccagcgctgcctagactggaaccgtgacatcctcaagaaggagctgggactgacagagcaggacatcattgacctgcccgctctgttcaagatggacgaggaccaccgtgccagagccttcttcccaaacatggtgaacatgatcgtgctggacaaggacctgggcatccccaagccattcgggccacaggttgaggaggaatgctgcctggagatgcacgtgcgtggcctcctggagcccctgggcctcgaatgcaccttcatcgacgacatttctgcctaccacaaatttctgggggaagtccactgtggcaccaacgtccgcaggaagcccttcaccttcaagtggtggcacatggtgccctgacctgccaggggccctggcgtttgcctccttcgcttagttctccagaccctccctcacacgcccagagccttctgctgacatggactggacagccccgctgggagacctttgggacgtggggtggaatttggggtatctgtgccttgccctccctgagaggggcctcagtgtcctctgaagccatccccagtgagcctcgactctgtccctgctgaaaatagctgggccagtgtctctgtagccctgacataaggaacagaacacaacaaaacacagcaaaccatgtgcccaaactgctccccaaagaattttgagtctctaatctgacactgaatgaggggagaagggaaggagattctgggattgccagttcttccagcagccatgctctgaaaatcaaggtagaatccatggaaagggaccccaggaccccgggaccctagacgtatcttgaactgccatcgtcatttcaaatacatctccctcagggtttccaggtggccacccccaattattcattccttaccaacctctcaaatcctcttggctttctctctgcagtgtggacactgttggctagtcctccccactccctgagggtccagtaagttagcttagaaccttcctggaaacatttcatctgagcaggtttccccacgtgtgggatgctccttttgcctcatctgtctcagggatgcaggctcccccgcatgcatggggatttctccccagaccagcatacttgtgacctgagagttcaatgcgtaaagatgcccctggtcagccatatccatcttctcttgcctggtccttgattctctggccgctccctgaccttcctccttccactgccttgactttcttcctttttattcctggtgccatctgtccaggcagctagacaagaacttgttcgccagcagccagattcaggccttcccaggggcataataagtgaccagcccctcctctccggacatcagatccaacacataaggaccctggcctaccctccagcccaacagccagttctgggtcagctgccaacttaggggtggtttgattatcccattgaaattcaccagtgcctttgccaaagaccctctcatttggacatacccagattcattccctggctccaactgaaaagactcagtttcaatcgttaaaagttcctttagggccagaagaataaatgaattataatcccattttgaagaaccgatttataaccaatgaaaaggttataatgtaatttatattcttggaggaacaagattttcatttgggattatttccttcaaccattcaacaaacatttgttgtatgccactaagcgccaggcacggcgttgggctctgcaaacacagtggttagtagcagtctggacctggtccctactggcatggaacccatcactccccaacatgcaaagcccacatttaaaggccagcctctgccccttcagtgatgcgctctttagaaatgccagtccactatattcagaaatccgcagggcacaaaacttccagcaagtcactgttgtggtgaaatgggcagtgggggtggggggtcttctttaaacaggcccccttcccatctacctagccagtacccatccaatgagtccccagagcctccagaagctgttgtctcctctctggggacagcagctcctgcctttggaggccaaagccccagatctctccagccccagagctgaaaacaccaagtgcctatttgagggtgtctgtctggagacttagagtttgtcatgtgtgtgtgtgtgtttggttaatgtgggtttatgggttttctttcttttttttctttttttttttagtctacattagggggaagtgagcgcctcccatgtgcagacagtgtgtctttatagatttttctaaggctttccccaatgatgtcggtaatttctgatgtttctgaagttcccaggactcacacacccgttcccatctcacttgcccacccagtgtgacaaccctcggtgtggatatacccccgtggactcatggctcttccccacccccactttctataaatgtaggcctagaatacgcttctctgttgcaaaactcagctaagttcctgcttccaccttgatgttgaaatatcttatgtaagagggcaggggatgtcgtgaagatggcaagaagaacacagtttcaaatttctggaaaagagcctgtggtggagatctaaagatgtttagggaagagctcgactaaagaacaatgaaataaatggtccaaggggaagtca

SEQ ID NO: 173 - DNA, 1815 bp, Homo sapiens
agaggcagagacacacgcggagaggaggagaggctgagggagggaggtggagaaggacgggagaggcagagagaggagacacgcagagacactcaggaggggagagacaccgagacgcagagacactcaggaggggagagacaccgagacgcagagacacccaggccggggagcgcgagggagcgaggcacagacctggctcagcgagcgcggggggcgagccccgagtcccgagagcctgggggcgcgcccagcccgggcgccgaccctcctcccgctcccgcgccctcccctcggcgggcacggtatttttatccgtgcgcgaacagccctcctcctcctctcgccgcacagcccgccgcctgcgcgggggagcccagcacagaccgccgccgggaccccgagtcgcgcaccccagccccaccgcccaccccgcgcgccatggaccccaaggaccgcaagaagatccagttctcggtgcccgcgccccctagccagctcgacccccgccaggtggagatgatccggcgcaggagaccaacgcctgccatgctgttccggctctcagagcactcctcaccagaggaggaagcctccccccaccagagagcctcaggagaggggcaccatctcaagtcgaagagacccaacccctgtgcctacacaccaccttcgctgaaagctgtgcagcgcattgctgagtctcacctgcagtctatcagcaatttgaatgagaaccaggcctcagaggaggaggatgagctgggggagcttcgggagctgggttatccaagagaggaagatgaggaggaagaggaggatgatgaagaagaggaagaagaagaggacagccaggctgaagtcctgaaggtcatcaggcagtctgctgggcaaaagacaacctgtggccagggtctggaagggccctgggagcgcccaccccctctggatgagtccgagagagatggaggctctgaggaccaagtggaagacccagcactaagtgagcctggggaggaacctcagcgcccttccccctctgagcctggcacataggcacccagcctgcatctcccaggaggaagtggaggggacatcgctgttccccagaaacccactctatcctcaccctgttttgtgctcttcccctcgcctgctagggctgcggcttctgacttctagaagactaaggctggtctgtgtttgcttgtttgcccacctttggctgatacccagagaacctgggcacttgctgcctgatgcccacccctgccagtcattcctccattcacccagcgggaggtgggatgtgagacagcccacattggaaaatccagaaaaccgggaacagggatttgcccttcacaattctactccccagatcctctcccctggacacaggagacccacagggcaggaccctaagatctggggaaaggaggtcctgagaaccttgaggtacccttagatccttttctacccactttcctatggaggattccaagtcaccacttctctcaccggcttctaccagggtccaggactaaggcgtttttctccatagcctcaacattttgggaatcttcccttaatcacccttgctcctcctgggtgcctggaagatggactggcagagacctctttgttgcgttttgtgctttgatgccaggaatgccgcctagtttatgtccccggtggggcacacagcggggggcgccaggttttccttgtcccccagctgctctgcccctttccccttcttccctgactccaggcctgaacccctcccgtgctgtaataaatctttgtaaataa

SEQ ID NO: 174 - DNA, 3067 bp, Homo sapiens
ggcgccgtcttgatactttcagaaagaatgcattccctgtaaaaaaaaaaaaaaaatactgagagagggagagagagagagaagaagagagagagacggagggagagcgagacagagcgagcaacgcaatctgaccgagcaggtcgtacgccgccgcctcctcctcctctctgctcttcgctacccaggtgacccgaggagggactccgcctccgagcggctgaggaccccggtgcagaggagcctggctcgcagaattgcagagtcgtcgcccctttttacaacctggtcccgttttattctgccgtacccagtttttggatttttgtcttccccttcttctctttgctaaacgacccctccaagataatttttaaaaaaccttctcctttgctcacctttgcttcccagccttcccatccccccaccgaaagcaaatcattcaacgacccccgaccctccgacggcaggagccccccgacctcccaggcggaccgccctccctccccgcgcgcgggttccgggcccggcgagagggcgcgagcacagccgaggccatggaggtgacggcggaccagccgcgctgggtgagccaccaccaccccgccgtgctcaacgggcagcacccggacacgcaccacccgggcctcagccactcctacatggacgcggcgcagtacccgctgccggaggaggtggatgtgctttttaacatcgacggtcaaggcaaccacgtcccgccctactacggaaactcggtcagggccacggtgcagaggtaccctccgacccaccacgggagccaggtgtgccgcccgcctctgcttcatggatccctaccctggctggacggcggcaaagccctgggcagccaccacaccgcctccccctggaatctcagccccttctccaagacgtccatccaccacggctccccggggcccctctccgtctaccccccggcctcgtcctcctccttgtcggggggccacgccagcccgcacctcttcaccttcccgcccaccccgccgaaggacgtctccccggacccatcgctgtccaccccaggctcggccggctcggcccggcaggacgagaaagagtgcctcaagtaccaggtgcccctgcccgacagcatgaagctggagtcgtcccactcccgtggcagcatgaccgccctgggtggagcctcctcgtcgacccaccaccccatcaccacctacccgccctacgtgcccgagtacagctccggactcttcccccccagcagcctgctgggcggctcccccaccggcttcggatgcaagtccaggcccaaggcccggtccagcacaggcagggagtgtgtgaactgtggggcaacctcgaccccactgtggcggcgagatggcacgggacactacctgtgcaacgcctgcgggctctatcacaaaatgaacggacagaaccggcccctcattaagcccaagcgaaggctgtctgcagccaggagagcagggacgtcctgtgcgaactgtcagaccaccacaaccacactctggaggaggaatgccaatggggaccctgtctgcaatgcctgtgggctctactacaagcttcacaatattaacagacccctgactatgaagaaggaaggcatccagaccagaaaccgaaaaatgtctagcaaatccaaaaagtgcaaaaaagtgcatgactcactggaggacttccccaagaacagctcgtttaacccggccgccctctccagacacatgtcctccctgagccacatctcgcccttcagccactccagccacatgctgaccacgcccacgccgatgcacccgccatccagcctgtcctttggaccacaccacccctccagcatggtcaccgccatgggttagagccctgctcgatgctcacagggcccccagcgagagtccctgcagtccctttcgacttgcatttttgcaggagcagtatcatgaagcctaaacgcgatggatatatgtttttgaaggcagaaagcaaaattatgtttgccactttgcaaaggagctcactgtggtgtctgtgttccaaccactgaatctggaccccatctgtgaataagccattctgactcatatcccctatttaacagggtctctagtgctgtgaaaaaaaaaatgctgaacattgcatataacttatattgtaagaaatactgtacaatgactttattgcatctgggtagctgtaaggcatgaaggatgccaagaagtttaaggaatatgggagaaatagtgtggaaattaagaagaaactaggtctgatattcaaatggacaaactgccagttttgtttcctttcactggccacagttgtttgatgcattaaaagaaaataaaaaaaagaaaaaagagaaaagaaaaaaaaagaaaaaagttgtaggcgaatcatttgttcaaagctgttggcctctgcaaaggaaataccagttctgggcaatcagtgttaccgttcaccagttgccgttgagggtttcagagagcctttttctaggcctacatgctttgtgaacaagtccctgtaattgttgtttgtatgtataattcaaagcaccaaaataagaaaagatgtagatttatttcatcatattatacagaccgaactgttgtataaatttatttactgctagtcttaagaactgctttctttcgtttgtttgtttcaatattttccttctctctcaatttttggttgaataaactagattacattcagttggcctaaggtggttgtgctcggagggtttcttgtttcttttccattttgtttttggatgatatttattaaatagcttctaagagtccggcggcatctgtcttgtccctattcctgcagcctgtgctgagggtagcagtgtatgagctaccagcgtgcatgtcagcgaccctggcccgacaggccacgtcctgcaatcggcccggctgcctcttcgccctgtcgtgttctgtgttagtgatcactgcctttaatacagtctgttggaataatattataagcataataataaagtgaaaatattttaaaactacaa

SEQ ID NO: 175 - DNA, 506 bp, Homo sapiens
acagcggcttccttgatccttgccacccgcgactgaacaccgacagcagcagcctcaccatgaagttgctgatggtcctcatgctggcggccctctcccagcactgctacgcaggctctggctgccccttattggagaatgtgatttccaagacaatcaatccacaagtgtctaagactgaatacaaagaacttcttcaagagttcatagacgacaatgccactacaaatgccatagatgaattgaaggaatgttttcttaaccaaacggatgaaactctgagcaatgttgaggtgtttatgcaattaatatatgacagcagtctttgtgatttattttaactttctgcaagacctttggctcacagaactgcagggtatggtgagaaaccaactacggattgctgcaaaccacaccttctctttcttatgtctttttactacaaactacaagacaattgttgaaacctgctatacatgtttattttaataaattgatggcaaaaa

SEQ ID NO: 176 - DNA, 1054 bp, Homo sapiens
gccaaaacagtgggggctgaactgacctctcccctttgggagagaaaaactgtctgggagcttgacaaaggcatgcaggagagaacaggagcagccacagccaggagggagagccttccccaagcaaacaatccagagcagctgtgcaaacaacggtgcataaatgaggcctcctggaccatgaagcgagtcctgagctgcgtcccggagcccacggtggtcatggctgccagagcgctctgcatgctggggctggtcctggccttgctgtcctccagctctgctgaggagtacgtgggcctgtctgcaaaccagtgtgccgtgccagccaaggacagggtggactgcggctacccccatgtcacccccaaggagtgcaacaaccggggctgctgctttgactccaggatccctggagtgccttggtgtttcaagcccctgcaggaagcagaatgcaccttctgaggcacctccagctgcccccggccgggggatgcgaggctcggagcacccttgcccggctgtgattgctgccaggcactgttcatctcagcttttctgtccctttgctcccggcaagcgcttctgctgaaagttcatatctggagcctgatgtcttaacgaataaaggtcccatgctccacccgaggacagttcttcgtgcctgagactttctgaggttgtgctttatttctgctgcgtcgtgggagagggcgggagggtgtcaggggagagtctgcccaggcctcaagggcaggaaaagactccctaaggagctgcagtgcatgcaaggatattttgaatccagactggcacccacgtcacaggaaagcctaggaacactgtaagtgccgcttcctcgggaaagcagaaaaaatacatttcaggtagaagttttcaaaaatcacaagtctttcttggtgaagacagcaagccaataaaactgtcttccaaagtggtcctttatttcacaaccactctcgctactgttcaatacttgtactattcctgggttttgtttctttgtacagtaaacattatgaacaaacaggca

SEQ ID NO: 177 - DNA, 3373 bp, Homo sapiens
ctcttcgcccgggtggcgttgggcccgcgcgggcgctcgggtgactgcagctgctcagctcccctcccccgccccgcgccgcgcggccgcccgtcgcttcgcacagggctggatggttgtattgggcagggtggctccaggatgttaggaactgtgaagatggaagggcatgaaaccagcgactggaacagctactacgcagacacgcaggaggcctactcctccgtcccggtcagcaacatgaactcaggcctgggctccatgaactccatgaacacctacatgaccatgaacaccatgactacgagcggcaacatgaccccggcgtccttcaacatgtcctatgccaacccgggcctaggggccggcctgagtcccggcgcagtagccggcatgccggggggctcggcgggcgccatgaacagcatgactgcggccggcgtgacggccatgggtacggcgctgagcccgagcggcatgggcgccatgggtgcgcagcaggcggcctccatgaatggcctgggcccctacgcggccgccatgaacccgtgcatgagccccatggcgtacgcgccgtccaacctgggccgcagccgcgcgggcggcggcggcgacgccaagacgttcaagcgcagctacccgcacgccaagccgccctactcgtacatctcgctcatcaccatggccatccagcaggcgcccagcaagatgctcacgctgagcgagatctaccagtggatcatggacctcttcccctattaccggcagaaccagcagcgctggcagaactccatccgccactcgctgtccttcaatgactgcttcgtcaaggtggcacgctccccggacaagccgggcaagggctcctactggacgctgcacccggactccggcaacatgttcgagaacggctgctacttgcgccgccagaagcgcttcaagtgcgagaagcagccgggggccggcggcgggggcgggagcggaagcgggggcagcggcgccaagggcggccctgagagccgcaaggacccctctggcgcctctaaccccagcgccgactcgcccctccatcggggtgtgcacgggaagaccggccagctagagggcgcgccggcccccgggcccgccgccagcccccagactctggaccacagtggggcgacggcgacagggggcgcctcggagttgaagactccagcctcctcaactgcgccccccataagctccgggcccggggcgctggcctctgtgcccgcctctcacccggcacacggcttggcaccccacgagtcccagctgcacctgaaaggggacccccactactccttcaaccacccgttctccatcaacaacctcatgtcctcctcggagcagcagcataagctggacttcaaggcatacgaacaggcactgcaatactcgccttacggctctacgttgcccgccagcctgcctctaggcagcgcctcggtgaccaccaggagccccatcgagccctcagccctggagccggcgtactaccaaggtgtgtattccagacccgtcctaaacacttcctagctcccgggactggggggtttgtctggcatagccatgctggtagcaagagagaaaaaatcaacagcaaacaaaaccacacaaaccaaaccgtcaacagcataataaaatcccaacaactatttttatttcatttttcatgcacaacctttcccccagtgcaaaagactgttactttattattgtattcaaaattcattgtgtatattactacaaagacaaccccaaaccaatttttttcctgcgaagtttaatgatccacaagtgtatatatgaaattctcctccttccttgcccccctctctttcttccctctttcccctccagacattctagtttgtggagggttatttaaaaaaacaaaaaaggaagatggtcaagtttgtaaaatatttgtttgtgctttttccccctccttacctgaccccctacgagtttacaggtctgtggcaatactcttaaccataagaattgaaatggtgaagaaacaagtatacactagaggctcttaaaagtattgaaagacaatactgctgttatatagcaagacataaacagattataaacatcagagccatttgcttctcagtttacatttctgatacatgcagatagcagatgtctttaaatgaaatacatgtatattgtgtatggacttaattatgcacatgctcagatgtgtagacatcctccgtatatttacataacatatagaggtaatagataggtgatatacatgatacattctcaagagttgcttgaccgaaagttacaaggaccccaacccctttgtcctctctacccacagatggccctgggaatcaattcctcaggaattgccctcaagaactctgcttcttgctttgcagagtgccatggtcatgtcattctgaggtcacataacacataaaattagtttctatgagtgtataccatttaaagaatttttttttcagtaaaagggaatattacaatgttggaggagagataagttatagggagctggatttcaaaacgtggtccaagattcaaaaatcctattgatagtggccattttaatcattgccatcgtgtgcttgtttcatccagtgttatgcactttccacagttggacatggtgttagtatagccagacgggtttcattattatttctctttgctttctcaatgttaatttattgcatggtttattctttttctttacagctgaaattgctttaaatgatggttaaaattacaaattaaattgttaatttttatcaatgtgattgtaattaaaaatattttgatttaaataacaaaaataataccagattttaagccgtggaaaatgttcttgatcatttgcagttaaggactttaaataaatcaaatgttaacaaaagagcatttctgttattttttttcacttaactaaatccgaagtgaatatttctgaatacgatatttttcaaattctagaactgaatataaatgacaaaaatgaaaataaaattgttttgtctgttgttataatgaatgtgtagctagtaaaaaggagtgaaagaaattcaagtaaagtgtataagttgatttaatattccaagagttgagatttttaagattctttattcccagtgatgtttacttcatttttttttttttttttgacaccggcttaagccttctgtgtttcctttgagccttttcactacaaaatcaaatattaatttaactacctttcctccttccccaatgtatcacttttctttatctgagaattcttccaatgaaaataaaatatcagctgtggctgatagaattaagttgtgtccaa

SEQ ID NO: 178 - DNA, 1820 bp, Homo sapiens
ggcgctgggcggctgcggcgcgcggtgcgcggtgcgtagtctggagctatggtggtggtggcagccgcgccgaacccggccgacgggacccctaaagttctgcttctgtcggggcagcccgcctccgccgccggagccccggccggccaggccctgccgctcatggtgccagcccagagaggggccagcccggaggcagcgagcggggggctgccccaggcgcgcaagcgacagcgcctcacgcacctgagccccgaggagaaggcgctgaggaggaaactgaaaaacagagtagcagctcagactgccagagatcgaaagaaggctcgaatgagtgagctggaacagcaagtggtagatttagaagaagagaaccaaaaacttttgctagaaaatcagcttttacgagagaaaactcatggccttgtagttgagaaccaggagttaagacagcgcttggggatggatgccctggttgctgaagaggaggcggaagccaaggggaatgaagtgaggccagtggccgggtctgctgagtccgcagcactcagactacgtgcacctctgcagcaggtgcaggcccagttgtcacccctccagaacatctccccatggattctggcggtattgactcttcagattcagagtctgatatcctgttgggcattctggacaacttggacccagtcatgttcttcaaatgcccttccccagagcctgccagcctggaggagctcccagaggtctacccagaaggacccagttccttaccagcctccctttctctgtcagtggggacgtcatcagccaagctggaagccattaatgaactaattcgttttgaccacatatataccaagcccctagtcttagagataccctctgagacagagagccaagctaatgtggtagtgaaaatcgaggaagcacctctcagcccctcagagaatgatcaccctgaattcattgtctcagtgaaggaagaacctgtagaagatgacctcgttccggagctgggtatctcaaatctgctttcatccagccactgcccaaagccatcttcctgcctactggatgcttacagtgactgtggatacgggggttccctttccccattcagtgacatgtcctctctgcttggtgtaaaccattcttgggaggacacttttgccaatgaactctttccccagctgattagtgtctaaggaatgatccaatactgttgcccttttccttgactattacactgcctggaggatagcagagaagcctgtctgtacttcattcaaaaagccaaaatagagagtatacagtcctagagaattcctctatttgttcagatctcatagatgacccccaggtattgtcttttgacatccagcagtccaaggtattgagacatattactggaagtaagaaatattactataattgagaactacagcttttaagattgtacttttatcttaaaagggtggtagttttccctaaaatacttattatgtaagggtcattagacaaatgtcttgaagtagacatggaatttatgaatggttctttatcatttctcttccccctttttggcatcctggcttgcctccagttttaggtcctttagtttgcttctgtaagcaacgggaacacctgctgagggggctctttccctcatgtatacttcaagtaagatcaagaatcttttgtgaaattatagaaatttactatgtaaatgcttgatggaattttttcctgctagtgtagcttctgaaaggtgctttctccatttatttaaaactacccatgcaattaaaaggtacaatgca

SEQ ID NO: 179 - DNA, 1697 bp, Homo sapiens
actcagaagcttggaccgcatcctagccgccgactcacacaaggcaggtgggtgaggaaatccagagttgccatggagaaaattccagtgtcagcattcttgctccttgtggccctctcctacactctggccagagataccacagtcaaacctggagccaaaaaggacacaaaggactctcgacccaaactgccccagaccctctccagaggttggggtgaccaactcatctggactcagacatatgaagaagctctatataaatccaagacaagcaacaaacccttgatgattattcatcacttggatgagtgcccacacagtcaagctttaaagaaagtgtttgctgaaaataaagaaatccagaaattggcagagcagtttgtcctcctcaatctggtttatgaaacaactgacaaacacctttctcctgatggccagtatgtccccaggattatgtttgttgacccatctctgacagttagagccgatatcactggaagatattcaaatcgtctctatgcttacgaacctgcagatacagctctgttgcttgacaacatgaagaaagctctcaagttgctgaagactgaattgtaaagaaaaaaaatctccaagcccttctgtctgtcaggccttgagacttgaaaccagaagaagtgtgagaagactggctagtgtggaagcatagtgaacacactgattaggttatggtttaatgttacaacaactattttttaagaaaaacaagttttagaaatttggtttcaagtgtacatgtgtgaaaacaatattgtatactaccatagtgagccatgattttctaaaaaaaaaaataaatgttttgggggtgttctgttttctccaacttggtctttcacagtggttcgtttaccaaataggattaaacacacacaaaatgctcaaggaagggacaagacaaaaccaaaactagttcaaatgatgaagaccaaagaccaagttatcatctcaccacaccacaggttctcactagatgactgtaagtagacacgagcttaatcaacagaagtatcaagccatgtgctttagcataaaagaatatttagaaaaacatcccaagaaaatcacatcactacctagagtcaactctggccaggaactctaaggtacacactttcatttagtaattaaattttagtcagattttgcccaacctaatgctctcagggaaagcctctggcaagtagctttctccttcagaggtctaatttagtagaaaggtcatccaaagaacatctgcactcctgaacacaccctgaagaaatcctgggaattgaccttgtaatcgatttgtctgtcaaggtcctaaagtactggagtgaaataaattcagccaacatgtgactaattggaagaagagcaaagggtggtgacgtgttgatgaggcagatggagatcagaggttactagggtttaggaaacgtgaaaggctgtggcatcagggtaggggagcattctgcctaacagaaattagaattgtgtgttaatgtcttcactctatacttaatctcacattcattaatatatggaattcctctactgcccagcccctcctgatttctttggcccctggactatggtgctgtatataatgctttgcagtatctgttgcttgtcttgattaacttttttggataaaaccttttttgaacaga

SEQ ID NO: 180 - DNA, 4548 bp, Homo sapiens
agacctggctcggggtgggagtgcagaggcaaccaaaaaggaacccacacctccctccagggcccggggcgctgtcagacggggcagcaaccaggagattccctgggcctgcaggaagcccttccgcggaccgaaagattgttccccattttggagatgaagaaactgagactcaaagcagctgagtgaccttcccaaggacacacactgaactgggcggtgatcaggatctgaatgcacagggcgggtgttcagcgattgtttactacgttgaacgtgacctccaggaaagcagttctggccgagatcccctgacaacgcaaagcaagaagtaacgtggaaggaggctccccaagctggctggccattttgctgctgtgtgtggaggtgctgccagtggcatgcccaaacccaaagctggaagaggaataaattacaagtggtcaaggttgcatccttttgagcccaggacctgcttgtaagccgagagggttctctggccctaatctagccaagcaccatggagagaatcagtgccttcttcagctctatctgggacaccatcttgaccaaacaccaagaaggcatctacaacaccatctgcctgggagtcctcctgggcctgccactcttggtgatcatcacactcctcttcatctgttgccattgctgctggagcccaccaggcaagaggggccagcagccagagaagaacaagaagaagaagaagaagaagaagaagaaggatgaagaagacctctggatctctgctcaacccaagcttctccagatggagaagagaccatcactgcctgtttagttaggcaggaagcagaggtgtttcctttctggggctaagcctccttctgaccacacacagacatttcaggaacccctgaaataatgcactatgtccatgtccacagagtaactactcaaccaaggaacaaacctcagactaagtgtcccagtggagggcagtcccagggaccacgtggacaattcttggatactgtcttggcagctatgtgtccaatagcaatgctccttactgcagacccaggcatgcctcccacctgtctctggcataccccacatgcaaagcacaaagaacatttatccatacatctcaatatggttcccaagtgtgtgcacatgcacgtaacacacacacacacaaattcaggtagcaggtacgtgggcaagtatattctgctcatcaaatggtcattggctatgtactttgtgcagggaagtacattatctacagtcacaaaaatgtctcatgggaaagccttgccagattcagacacatatatacaatttcctaaccagcaaggcccccatacaccatctattccataaaccactcaggttacagatgcatgctttcctatttctaactctacacataaacttttactggaagtactcataattggacattccagcaacctgctacagtccccacccttgtgtgtcttgatacagacacaccaagtttctgtgcctctgacccctcacctgtgccaagatgtttaaagtgtgatggttcaaaattcattgaaagctcttttcttgtaactcatgacaaagtccgtcctcattgccactgagaggtgtttaatgtgatccaagacctctctgtgaaacattacccccgcaaaccactcagcaaagtgcctttctccaagcaagaacaaagagctcttggtggtgactgctagaaaattatggaagcccactcatttatgtcagtggactgcaactgtgtacctgtgcaatgtttacagatggaaagggtgaggagatgctacacctgagctaggtatctcctatataaccaaagtttccagcagggaaggaactagacaatcatcagtgcagtctcacagaaggcaacactggaagtgatgtcataaggttgtgatgtgtgcacggtatggcacaggtgggatgcagaggtaacagagtttaaatgaaagtaggatgaagctataaagaggtttatttatatttatattgaagctcaggcaagtgccttgcacacagtaggtacttataactaactgtggttactgttggatatgtgatgttgttaagggtaagcttgtaatacctcaccagttctccccgagtgatcttctcttctaagtgagcccactaattgctgcaatggatgaaattgggtgtttaatgctggagagcacatgtaggtgacacatgtgccttgaggtatgtgaggacatgtaaattagatccacagtgagctgaggagggctttccccgccagagtgaggttgggaagcagagttaatccacttataggatgaactgcttggtatttttattgtattgtgactgtattacaaagatggacaattcactccttgggagcaagttatgctctagaagtttatttacaaatatgctgggcagctctcttgaaatattttcccaaggaagctattctacacagtggcaaaattgctatctaattaataatgtagctaaactatgatatttatagtagcaaaaaactaaattctataagattgcattaaaggaaagatatattctatttgctcacttgggctgcttggtactcacctgccctccaggtgtactttaggcctgtggagggtgggcatttagtggtgacccttgcaccagggttttctaacagatgaccctgtgaatcataatttaaacctgcatatattttatagccagtcacatttgccctctcaccctatatggccataaactgcctaagcactcaggcctcccactcatcaacccctttgaccagagaaagaagcactctggttctctatccccttgtcacatagagagtttgtcatggggcctctggctgtgcccttcacataacagaatgacttgccatctgcctgcaccaaacccagggatgtggaagacatctccccacaactgccactgctcaccaggacaagctgcccttcctgtctccacctctcagtccccctagaatggatggctggggagaggtggaggctgacagctgagacgtagtgtcagatatgatctaggagggcggatcaccgggatccgggaccatacaagtaacatggtttccatggcaactgcttgctcctttgaattaagacagcagtcagttgtcattgccatgacaaggcctctatctccaggcacaatgtccctgctgtctcctaatccaatggacttgctctcaccccagggatgaaacacccagaaactcacttctcagtcacttccacagccgatgactcagaagagccaaacccagaatggggcctctcttttccccatcacagactcccctgacaacctttcctggcgtaactagaggagtcccagtgcaggataggccctaaacgttttgttaaataaacaggtgcatgaaaggagcctaaggccattgttgatatccactctcttctttccacttccttctcatctttttctccatgttttatgcttctctgattccctcttctgcctgcaccagaccagccccagccctttattcctctccattttcactccttccagcctctgtccctgaactgccactggcaacccatgggacctcaggaccagagactgcttgactcatctggggagggtaagttcacgggggacaaaaaaatgattcctaaagaagaggcttcctagaccagcacaggctcgagaaagacatcccctaggcctggacttctgagcagctttagccaggctccggacggcagccagaggaggcctttccccattgctcctttccccattgctcaatggattccatgtttctttttcttggggggagcagggagggagaaaggtagaaaaatggcagccacctttccaagaaaaatataaagggtccaagctgtatagtatttgtcagtatttttttctgtaaaattcaaacacacacaaaagaaaaatttatttaaataaaatactttgaaaatgaaaagtcttgatgtagtcagatggttactctcttaacattaggtattacccccactcagacatcactcagaaatgatcaatgcagggactctttctgtgacacaaatgtcccagccctccctggtcaccgccttcgccatggtagagtcataggtctgaggatgaggaatgtggctgtctcacccttgcttgcaaaacagatggccttggagaccagactccctcaaaggtgccagctacaggaaaaatatactgatgttccttggcaacacttacagaactttccatcaatgaggtccatcaatggcttcttaaaggaaaaggggggaaatagcaaaaacctaaggaagaatggacctttgagttaaatccagtgtttgttgggaaaggagggatcaaaaacctctatagtagccactagggcaaaaactgtgtgtatgtgtgtgtgtaagtgtgtgtacactgttcaatatggttcaatatggtaccaatagccacatgtgactatttaaattcattgcaatgaaataaaattaaaggtatactagctca

SEQ ID NO: 181 - DNA, 3744 bp, Homo sapiens
agttgcccgcctgccccggagagccaggcgctaaccagccgctctgcgccccgcgccctgcttgcccccattatccagccttgccccggcgccctgacctgacgccctggcctgacgccctgcttcgtcgcctcctttctctcccaggtgctggaccagggactgagcgtcccccggagagggtccggtgtgaccccgacaagaagcagaaatggggaagaaactggatctttccaagctcactgatgaagaggcccagcatgtcttggaagttgttcaacgagattttgacctccgaaggaaagaagaggaacggctagaggcgttgaagggcaagattaagaaggaaagctccaagagggagctgctttccgacactgcccatctgaacgagacccactgcgcccgctgcctgcagccctaccagctgcttgtgaatagcaaaaggcagtgcctggaatgtggcctcttcacctgcaaaagctgtggccgcgtccacccggaggagcagggctggatctgtgacccctgccatctggccagagtcgtgaagatcggctcactggagtggtactatgagcatgtgaaagcccgcttcaagaggttcggaagtgccaaggtcatccggtccctccacgggcggctgcagggtggagctgggcctgaactgatatctgaagagagaagtggagacagcgaccagacagatgaggatggagaacctggctcagaggcccaggcccaggcccagccctttggcagcaaaaaaaagcgcctcctctccgtccacgacttcgacttcgagggagactcagatgactccactcagcctcaaggtcactccctgcacctgtcctcagtccctgaggccagggacagcccacagtccctcacagatgagtcctgctcagagaaggcagcccctcacaaggctgagggcctggaggaggctgatactggggcctctgggtgccactcccatccggaagagcagccgaccagcatctcaccttccagacacggcgccctggctgagctctgcccgcctggaggctcccacaggatggccctggggactgctgctgcactcgggtcgaatgtcatcaggaatgagcagctgcccctgcagtacttggccgatgtggacacctctgatgaggaaagcatccgggctcacgtgatggcctcccaccattccaagcggagaggccgggcgtcttctgagagtcagatctttgagctgaataagcatatttcagctgtggaatgcctgctgacctacctggagaacacagttgtgcctcccttggccaagggtctaggtgctggagtgcgcacggaggccgatgtagaggaggaggccctgaggaggaagctggaggagctgaccagcaacgtcagtgaccaggagacctcgtccgaggaggaggaagccaaggacgaaaaggcagagcccaacagggacaaatcagttgggcctctcccccaggcggacccggaggtgggcacggctgcccatcaaaccaacagacaggaaaaaagcccccaggaccctggggaccccgtccagtacaacaggaccacagatgaggagctgtcagagctggaggacagagtggcagtgacggcctcagaagtccagcaggcagagagcgaggtttcagacattgaatccaggattgcagccctgagggccgcagggctcacggtgaagccctcgggaaagccccggaggaagtcaaacctcccgatatttctccctcgagtggctgggaaacttggcaagagaccagaggacccaaatgcagacccttcaagtgaggccaaggcaatggctgtgccctatcttctgagaagaaagttcagtaattccctgaaaagtcaaggtaaagatgatgattcttttgatcggaaatcagtgtaccgaggctcgctgacacagagaaaccccaacgcgaggaaaggaatggccagccacaccttcgcgaaacctgtggtggcccaccagtcctaacgggacaggacagagagacagagcagccctgcactgttttccctccaccacagccatcctgtccctcattggctctgtgctttccactatacacagtcaccgtcccaatgagaaacaagaaggagcaccctccacatggactcccacctgcaagtggacagcgacattcagtcctgcactgctcacctgggtttactgatgactcctggctgccccaccatcctctctgatctgtgagaaacagctaagctgctgtgacttccctttaggacaatgttgtgtaaatctttgaaggacacaccgaagacctttatactgtgatcttttacccctttcactcttggctttcttatgttgctttcatgaatggaatggaaaaaagatgactcagttaaggcaccagccatatgtgtattcttgatggtctatatcggggtgtgagcagatgtttgcgtatttcttgtgggtgtgactggatattagacatccggacaagtgactgaactaatgatctgctgaataatgaaggaggaatagacaccccagtccccaccctacgtgcacccgctctgcaagttcccatgtgatctgtagaccaggggaaattacactgcggtcaagggcagagcctgcacatgacagcaagtgagcatttgatagatgctcagatgctagtgcagagagcctgctgggagacgaagagacagcaggcagagctccagatgggcaaggaagaggcttggttctagcctggctctgcccctcactgcagtggatccagtggggcagaggacagagggtcacaaccaatgagggatgtctgccaaggatgggggtgcagaggccacaggagtcagcttgccactcgcccattggttacatagatgatctctcagacaggctgggactcagagttatttcctagtatcggtgtgccccatccagttttaagtggagccctccaagactctccagagctgcctttgaacatcctaacagtaatcacatctcaccctccctgaggttcactttagacaggacccaatggctgcactgcctttgtcagagggggtgctgagaggagtggcttcttttagaatcaaacagtagagacaagagtcaagccttgtgtcttcaagcattgaccaagttaagtgtttccttccctctctcaataagacacttccaggagctttccaatctctcacttaaaactaaggtttgaatctcaaagtgttgctgggaggctgatactcctgcaacttcaggagacctgtgagcacacattagcagctgtttctctgactccttgtggcatcagataaaaacgtgggagtttttccatataattcccagccttacttataaattctattctttgaaaaaattattcaggctaggtaaggtggctcatacctataatcccagccctttgagaggccaaggtgggagaattgcttgaggccaggagtttgagacctcctgggcaacatagtgagatcccatctctacaaaaaacaaaacaaaaaaattacccaagcatgatggtatatgcctgtagtcgtacctacttacttaggaggctgaggcaggaggatcacttgagccctggaggttggggctgcagtgagccatgatcgcatcactatactcgagcctgggcaacagagtgagaccttgtctcttaaaaaaattaataataaataaatgaaaataattcttcagagttc

SEQ ID NO: 182 - DNA, 485 bp, Homo sapiens
agcgccttgccttctcttaggctttgaagcatttttgtctgtgctccctgatcttcaggtcaccaccatgaagttcttagcagtcctggtactcttgggagtttccatctttctggtctctgcccagaatccgacaacagctgctccagctgacacgtatccagctactggtcctgctgatgatgaagcccctgatgctgaaaccactgctgctgcaaccactgcaaccactgctgctcctaccactgcaaccaccgctgcttctaccactgctcgtaaagacattccagttttacccaaatgggttggggatctcccgaatggtagagtgtgtccctgagatggaatcagcttgagtcttctgcaattggtcacaactattcatgcttcctgtgatttcatccaactacttaccttgcctacgatatcccctttatctctaatcagtttattttctttcaaataaaaaataactatgagcaaca

SEQ ID NO: 183 - DNA, 2477 bp, Homo sapiens
ctgagaaaccacaggaagtgtaccttactccctccgggccacctgctggccaggtacacacctgcccctggcccctcccttacctggggcagtgtctgcctggtggccactagagacagcccagcctggggccatggaagaaaacccgaccttggaatcagaagcctggggctcctctagggagtggctggccccccgggaggccagaggaggcccatcgctgtcttctgtgctgaacgagctgcccagtgctgccacccttcggtaccgagaccctggggtgctgccttggggggcgctggaggaggaggaggaggatggaggaaggagcagaaaggccttcacagaagtcacccagacagagctgcaggaccctcacccttcccgggaactgccctggcccatgcaggccagacgggcacacaggcaaagaaatgccagcagggaccaggtggtctatggctctggaactaagacggaccgatgggcgcggctacttcggaggtccaaggagaaaacaaaggaaggcttgcgaagcctgcagccctgggcgtggacactgaagaggatcgggggccagtttggcgccggcacggagtcctacttctccctgctgcgcttcctgctccttcttaacgtgctggcctctgtgctcatggcctgcatgacgctgctgcccacctggttgggaggcgctcccccaggccctcccggccccgacatctcctcgccctgcggctcctataacccccactcccagggcctggtcacctttgccacccagctcttcaacttgctctcgggtgagggttacctggaatggtcccctctcttctatggcttctacccgccccgcccacgcctggcggtcacctacctgtgctgggcctttgccgttggcctcatctgcctcctgctcatcctgcatcgctcggtgtctgggctgaagcagacactgctggcggagtccgaggctctgaccagctacagccaccgggtgttctcggcctgggacttcggtctctgcggggacgtccacgtgcggctgcgccagcgcatcatcttgtacgaattaaaggtggagctggaggagacagtggtgcggcgccaggctgcggtgcggacgctgggccagcaagccagggtttggttggtgcgggtgctgctcaacctgctggtggtcgcgctcctgggggcagccttctatggcgtctactgggctacggggtgcaccgtggagctgcaggagatgccccttgtccaggagttgccactgctgaagcttggggtgaattaccttccgtccatcttcatcgctggggtcaattttgtgctgccgcccgtgttcaagctcattgctccactggagggctacactcggagtcgccagatcgtttttatcctgctcaggaccgtgtttcttcgcctcgcctccctggtggtcctgctcttctctctctggaatcagatcacttgtgggggcgactccgaggctgaggactgcaaaacctgtggctacaattacaaacaacttccgtgctgggagactgtcctgggccaggaaatgtacaaacttctgctctttgatctgctgactgtcttggcagtcgcgctgctcatccagtttcctagaaagctcctctgtggcctctgtcctggggcgctgggtcgtctggcggggacccaagagttccaggtgcccgacgaggtgctggggctcatctacgcgcagacggtggtctgggtggggagttttttctgccctttactgcccctgcttaacacggtcaagttcctgctgcttttctacctgaagaagcttaccctcttctccacctgctccccggctgcccgcaccttccgggcctccgcggcgaatttctttttccccttggtccttctcctgggtctggccatctccagcgttcccctgctttacagcatcttcctgatcccgccttctaagctgtgtggtccattccgggggcagtcgtccatctgggcccagatccctgagtctatttccagcctccctgagaccacccagaatttcctcttcttcctggggacccaggcttttgctgtgccccttctgctgatctccagcatcctgatggcgtacactgtggctctggctaactcctacggacgcctcatctctgagctcaaacgtcagagagagacggaggcgcagaataaagtcttcctggcacggcgcgctgtggcgctgacctccaccaaaccggctctttgacccccgcagcccacgtcccgctttcagaccccaggcccattgtaagcctaggtcacaacatctgtaaactaggagaactggagaagactccacgcccttccagctttggtatctggagatttccagggcccctcgccgccacgtccctgactctcgggtgatcttccttgtatcaataaatacagccgaggttgctgagcgcgctttgaaaaaaaaaaaaaaa

SEQ ID NO: 184 - DNA, 846 bp, Homo sapiens
tgggccttcccccaggaagagccccacggccagctccttcctgttcccctggcggcccctcgcttcttccttctggatgggggcccagggggcccaggagagtataaaggcgatgtggagggtgcccggcacaaccagacgcccagtcacaggcgagagccctgggatgcaccggccagaggccatgctgctgctgctcacgcttgccctcctggggggccccacctgggcagggaagatgtatggccctggaggaggcaagtatttcagcaccactgaagactacgaccatgaaatcacagggctgcgggtgtctgtaggtcttctcctggtgaaaagtgtccaggtgaaacttggagactcctgggacgtgaaactgggagccttaggtgggaatacccaggaagtcaccctgcagccaggcgaatacatcacaaaagtctttgtcgccttccaagctttcctccggggtatggtcatgtacaccagcaaggaccgctatttctattttgggaagcttgatggccagatctcctctgcctaccccagccaagaggggcaggtgctggtgggcatctatggccagtatcaactccttggcatcaagagcattggctttgaatggaattatccactagaggagccgaccactgagccaccagttaatctcacatactcagcaaactcacccgtgggtcgctagggtggggtatggggccatccgagctgaggccatctgggtggtggtggctgatggtactggagtaactgagtcgggacgctgaatctgaatccaccaataaataaaggttctgcagaatcagtgcaaaaaaaaaaaaaaaaaaa

SEQ ID NO: 185 - DNA, 3258 bp, Homo sapiens
gtgcaccctgtcccagccgtcctgtcctggctgctcgctctgcttcgctgcgcctccactatgctctccctccgtgtcccgctcgcgcccatcacggacccgcagcagctgcagctctcgccgctgaaggggctcagcttggtcgacaaggagaacacgccgccggccctgagcgggacccgcgtcctggccagcaagaccgcgaggaggatcttccaggagcccacggagccgaaaactaaagcagctgcccccggcgtggaggatgagccgctgctgagagaaaacccccgccgctttgtcatcttccccatcgagtaccatgatatctggcagatgtataagaaggcagaggcttccttttggaccgccgaggaggtggacctctccaaggacattcagcactgggaatccctgaaacccgaggagagatattttatatcccatgttctggctttctttgcagcaagcgatggcatagtaaatgaaaacttggtggagcgatttagccaagaagttcagattacagaagcccgctgtttctatggcttccaaattgccatggaaaacatacattctgaaatgtatagtcttcttattgacacttacataaaagatcccaaagaaagggaatttctcttcaatgccattgaaacgatgccttgtgtcaagaagaaggcagactgggccttgcgctggattggggacaaagaggctacctatggtgaacgtgttgtagcctttgctgcagtggaaggcattttcttttccggttcttttgcgtcgatattctggctcaagaaacgaggactgatgcctggcctcacattttctaatgaacttattagcagagatgagggtttacactgtgattttgcttgcctgatgttcaaacacctggtacacaaaccatcggaggagagagtaagagaaataattatcaatgctgttcggatagaacaggagttcctcactgaggccttgcctgtgaagctcattgggatgaattgcactctaatgaagcaatacattgagtttgtggcagacagacttatgctggaactgggttttagcaaggttttcagagtagagaacccatttgactttatggagaatatttcactggaaggaaagactaacttctttgagaagagagtaggcgagtatcagaggatgggagtgatgtcaagtccaacagagaattcttttaccttggatgctgacttctaaatgaactgaagatgtgcccttacttggctgattttttttttccatctcataagaaaaatcagctgaagtgttaccaactagccacaccatgaattgtccgtaatgttcattaacagcatctttaaaactgtgtagctacctcacaaccagtcctgtctgtttatagtgctggtagtatcaccttttgccagaaggcctggctggctgtgacttaccatagcagtgacaatggcagtcttggctttaaagtgaggggtgaccctttagtgagcttagcacagcgggattaaacagtcctttaaccagcacagccagttaaaagatgcagcctcactgcttcaacgcagattttaatgtttacttaaatataaacctggcactttacaaacaaataaacattgtttgtactcacaaggcgataatagcttgatttatttggtttctacaccaaatacattctcctgaccactaatgggagccaattcacaattcactaagtgactaaagtaagttaaacttgtgtagactaagcatgtaatttttaagttttattttaatgaattaaaatatttgttaaccaactttaaagtcagtcctgtgtatacctagatattagtcagttggtgccagatagaagacaggttgtgtttttatcctgtggcttgtgtagtgtcctgggattctctgccccctctgagtagagtgttgtgggataaaggaatctctcagggcaaggagcttcttaagttaaatcactagaaatttaggggtgatctgggccttcatatgtgtgagaagccgtttcattttatttctcactgtattttcctcaacgtctggttgatgagaaaaaattcttgaagagttttcatatgtgggagctaaggtagtattgtaaaatttcaagtcatccttaaacaaaatgatccacctaagatcttgcccctgttaagtggtgaaatcaactagaggtggttcctacaagttgttcattctagttttgtttggtgtaagtaggttgtgtgagttaattcatttatatttactatgtctgttaaatcagaaattttttattatctatgttcttctagattttacctgtagttcatacttcagtcacccagtgtcttattctggcattgtctaaatctgagcattgtctagggggatcttaaactttagtaggaaaccatgagctgttaatacagtttccattcaaatattaatttcagaatgaaacataatttttttttttttttttgagatggagtctcgctctgttgcccaggctggagtgcagtggcgcgattttggctcactgtaacctccatctcctgggttcaagcaattctcctgtctcagcctccctagtagctgggactgcaggtatgtgctaccacacctggctaatttttgtatttttagtagagatggagtttcaccatattggtcaggctggtcttgaactcctgacctcaggtgatccacccacctcggcctcccaaagtgctgggattgcaggcgtgataaacaaatattcttaatagggctactttgaattaatctgcctttatgtttgggagaagaaagctgagacattgcatgaaagatgatgagagataaatgttgatcttttggccccatttgttaattgtattcagtatttgaacgtcgtcctgtttattgttagttttcttcatcatttattgtatagacaatttttaaatctctgtaatatgatacattttcctatcttttaagttattgttacctaaagttaatccagattatatggtccttatatgtgtacaacattaaaatgaaaggctttgtcttgcattgtgaggtacaggcggaagttggaatcaggttttaggattctgtctctcattagctgaataatgtgaggattaacttctgccagctcagaccatttcctaatcagttgaaagggaaacaagtatttcagtctcaaaattgaataatgcacaagtcttaagtgattaaaataaaactgttcttatgtca

SEQ ID NO: 186 - DNA, 2748 bp, Homo sapiens
ggcgggctgctcgctgcatctctgggcgtctttggctcgccacgctgggcagtgcctgcctgcgcctttcgcaacctcctcggccctgcgtggtctcgagctgggtgagcgagcgggcgggctggtaggctggcctgggctgcgaccggcggctacgactattctttggccgggtcggtgcgagtggtcggctgggcagagtgcacgctgcttggcgccgcaggctgatcccgccgtccactcccgggagcagtgatgttgggcaactctgcgccggggcctgcgacccgcgaggcgggctcggcgctgctagcattgcagcagacggcgctccaagaggaccaggagaatatcaacccggaaaaggcagcgcccgtccaacaaccgcggacccgggccgcgctggcggtactgaagtccgggaacccgcggggtctagcgcagcagcagaggccgaagacgagacgggttgcaccccttaaggatcttcctgtaaatgatgagcatgtcaccgttcctccttggaaagcaaacagtaaacagcctgcgttcaccattcatgtggatgaagcagaaaaagaagctcagaagaagccagctgaatctcaaaaaatagagcgtgaagatgccctggcttttaattcagccattagtttacctggacccagaaaaccattggtccctcttgattatccaatggatggtagttttgagtcaccacatactatggacatgtcaattatattagaagatgaaaagccagtgagtgttaatgaagtaccagactaccatgaggatattcacacataccttagggaaatggaggttaaatgtaaacctaaagtgggttacatgaagaaacagccagacatcactaacagtatgagagctatcctcgtggactggttagttgaagtaggagaagaatataaactacagaatgagaccctgcatttggctgtgaactacattgataggttcctgtcttccatgtcagtgctgagaggaaaacttcagcttgtgggcactgctgctatgctgttagcctcaaagtttgaagaaatataccccccagaagtagcagagtttgtgtacattacagatgatacctacaccaagaaacaagttctgagaatggagcatctagttttgaaagtccttacttttgacttagctgctccaacagtaaatcagtttcttacccaatactttctgcatcagcagcctgcaaactgcaaagttgaaagtttagcaatgtttttgggagaattaagtttgatagatgctgacccatacctcaagtatttgccatcagttattgctggagctgcctttcatttagcactctacacagtcacgggacaaagctggcctgaatcattaatacgaaagactggatataccctggaaagtcttaagccttgtctcatggaccttcaccagacctacctcaaagcaccacagcatgcacaacagtcaataagagaaaagtacaaaaattcaaagtatcatggtgtttctctcctcaacccaccagagacactaaatctgtaacaatgaaagactgcctttgttttctaagatgtaaatcactcaaagtatatggtgtacagtttttaacttaggttttaattttacaatcatttctgaatacagaagttgtggccaagtacaaattatggtatctattactttttaaatggttttaatttgtatatcttttgtatatgtatctgtcttagatatttggctaattttaagtggttttgttaaagtattaatgatgccagctgtcaggataataaattgatttggaaaactttgcaagtcaaatttaacttcttcaggattttgcttagtaaagaagtttacttggtttactatataatgggaagtgaaaagccttcctctaaaattaaagtaggtttaggaaaacagaccctcaaattctgacattcattttcctaagcaactggatcaatttgctgacttgggcataatctaatctaagcatatctgaatacagtattcagagatagatacagtagagattccccagactttttcgctctttgtaaaacctgtttgtttaggttttgcgaggtaaactcaacagaggttgggagtggaagagggtgggaagcttatatgcaaattaacagacgagaaatgctccagaaggtttattattttaaagcacattaaaaacaaaaaactatttttaaaatcctgctagattttataatggatttgtgaataaaaaatacccagggttctcagaatggaataaatatcccttttaatagttatatatacagatatacaactgttagctttaattggcagctctcttcttttttcttcttttcactggctttttacttggtgctttttcttgttttgcactggtggtctgtgttctgtgaataaagcaaagtaagaatttactaagagtatgttaagttttggattattgaaataagaggcatttcttagttttccagtaggatctaaaatgtgtcagctatgagtaagactggcatccaagaagtttatattatagatttaggtcctaatttttataaatcacaaggtaaaaaaatcacagaacagatggatctctaatgaaaaagggatgtctttttgtttatagtcatgtggcaagatgagagtaaaaccagagagcaaacctctataagtgttgagtatatgtatacatttgaaataaaccagaaatttgttacctta

SEQ ID NO: 187 - DNA, 1649 bp, Homo sapiens
cggtcggaactgctccggagggcacgggctccgtaggcaccaactgcaaggacccctccccctgcgggcgctcccatggcacagttcgcgttcgagagtgacctgcactcgctgcttcagctggatgcacccatccccaatgcaccccctgcgcgctggcagcgcaaagccaaggaagccgcaggcccggccccctcacccatgcgggccgccaaccgatcccacagcgccggcaggactccgggccgaactcctggcaaatccagttccaaggttcagaccactcctagcaaacctggcggtgaccgctatatcccccatcgcagtgctgcccagatggaggtggccagcttcctcctgagcaaggagaaccagcctgaaaacagccagacgcccaccaagaaggaacatcagaaagcctgggctttgaacctgaacggttttgatgtagaggaagccaagatccttcggctcagtggaaaaccacaaaatgcgccagagggttatcagaacagactgaaagtactctacagccaaaaggccactcctggctccagccggaagacctgccgttacattccttccctgccagaccgtatcctggatgcgcctgaaatccgaaatgactattacctgaaccttgtggattggagttctgggaatgtactggccgtggcactggacaacagtgtgtacctgtggagtgcaagctctggtgacatcctgcagcttttgcaaatggagcagcctggggaatatatatcctctgtggcctggatcaaagagggcaactacttggctgtgggcaccagcagtgctgaggtgcagctatgggatgtgcagcagcagaaacggcttcgaaatatgaccagtcactctgcccgagtgggctccctaagctggaacagctatatcctgtccagtggttcacgttctggccacatccaccaccatgatgttcgggtagcagaacaccatgtggccacactgagtggccacagccaggaagtgtgtgggctgcgctgggccccagatggacgacatttggccagtggtggtaatgataacttggtcaatgtgtggcctagtgctcctggagagggtggctgggttcctctgcagacattcacccagcatcaaggggctgtcaaggccgtagcatggtgtccctggcagtccaatgtcctggcaacaggagggggcaccagtgatcgacacattcgcatctggaatgtgtgctctggggcctgtctgagtgccgtggatgcccattcccaggtgtgctccatcctctggtctccccattacaaggagctcatctcaggccatggctttgcacagaaccagctagttatttggaagtacccaaccatggccaaggtggctgaactcaaaggtcacacatcccgggtcctgagtctgaccatgagcccagatggggccacagtggcatccgcagcagcagatgagaccctgaggctatggcgctgttttgagttggaccctgcgcggcggcgggagcgggagaaggccagtgcagccaaaagcagcctcatccaccaaggcatccgctgaagaccaacccatcacctcagttgttttttatttttctaataaagtcatgtctcccttcatgttttttttttaaa

SEQ ID NO: 188 - DNA, 1923 bp, Homo sapiens
agcgcggtgagtttgaaactgctcgcacttggcttcaaagctggctcttggaaattgagcggagagcgacgcggttgttgtagctgccgctgcggccgccgcggaataataagccgggatctaccatacccattgactaactatggaagattataccaaaatagagaaaattggagaaggtacctatggagttgtgtataagggtagacacaaaactacaggtcaagtggtagccatgaaaaaaatcagactagaaagtgaagaggaaggggttcctagtactgcaattcgggaaatttctctattaaaggaacttcgtcatccaaatatagtcagtcttcaggatgtgcttatgcaggattccaggttatatctcatctttgagtttctttccatggatctgaagaaatacttggattctatccctcctggtcagtacatggattcttcacttgttaagagttatttataccaaatcctacaggggattgtgttttgtcactctagaagagttcttcacagagacttaaaacctcaaaatctcttgattgatgacaaaggaacaattaaactggctgattttggccttgccagagcttttggaatacctatcagagtatatacacatgaggtagtaacactctggtacagatctccagaagtattgctggggtcagctcgttactcaactccagttgacatttggagtataggcaccatatttgctgaactagcaactaagaaaccacttttccatggggattcagaaattgatcaactcttcaggattttcagagctttgggcactcccaataatgaagtgtggccagaagtggaatctttacaggactataagaatacatttcccaaatggaaaccaggaagcctagcatcccatgtcaaaaacttggatgaaaatggcttggatttgctctcgaaaatgttaatctatgatccagccaaacgaatttctggcaaaatggcactgaatcatccatattttaatgatttggacaatcagattaagaagatgtagctttctgacaaaaagtttccatatgttatatcaacagatagttgtgtttttattgttaactcttgtctatttttgtcttatatatatttctttgttatcaaacttcagctgtacttcgtcttctaatttcaaaaatataacttaaaaatgtaaatattctatatgaatttaaatataattctgtaaatgtgtgtaggtctcactgtaacaactatttgttactataataaaactataatattgatgtcaggaatcaggaaaaaatttgagttggcttaaatcatctcagtccttatggcagttttattttcctgtagttggaactactaaaatttaggaaaatgctaagttcaagtttcgtaatgctttgaagtatttttatgctctgaatgtttaaatgttctcatcagtttcttgccatgttgttaactatacaacctggctaaagatgaatatttttctactggtattttaatttttgacctaaatgtttaagcattcggaatgagaaaactatacagatttgagaaatgatgctaaatttataggagttttcagtaacttaaaaagctaacatgagagcatgccaaaatttgctaagtcttacaaagatcaagggctgtccgcaacagggaagaacagttttgaaaatttatgaactatcttatttttaggtaggttttgaaagctttttgtctaagtgaattcttatgccttggtcagagtaataactgaaggagttgcttatcttggctttcgagtctgagtttaaaactacacattttgacatagtgtttattagcagccatctaaaaaggctctaatgtatatttaactaaaattactagctttgggaattaaactgtttaacaaataaaaaaaaaaaa

SEQ ID NO: 189 - DNA, 616 bp, Homo sapiens
gttagtctccggcgagttgttgcctgggctggacgtggttttgtctgctgcgcccgctcttcgcgctctcgtttcattttctgcagcgcgccagcaggatggcccacaagcagatctactactcggacaagtacttcgacgaacactacgagtaccggcatgttatgttacccagagaactttccaaacaagtacctaaaactcatctgatgtctgaagaggagtggaggagacttggtgtccaacagagtctaggctgggttcattacatgattcatgagccagaaccacatattcttctctttagacgacctcttccaaaagatcaacaaaaatgaagtttatctggggatcgtcaaatctttttcaaatttaatgtatatgtgtatataaggtagtattcagtgaatacttgagaaatgtacaaatctttcatccatacctgtgcatgagctgtattcttcacagcaacagagctcagttaaatgcaactgcaagtaggttactgtaagatgtttaagataaaagttcttccagtcagtttttctcttaagtgcctgtttgagtttactgaaacagtttacttttgttcaataaagtttgtatgttgcattta

SEQ ID NO: 190 - DNA, 1651 bp, Homo sapiens
acagcagttacactgcggcgggcgtctgttctagtgtttgagccgtcgtgcttcaccggtctacctcgctagcatgtcgggccgcggcaagactggcggcaaggcccgcgccaaggccaagtcgcgctcgtcgcgcgccggcctccagttcccagtgggccgtgtacaccggctgctgcggaagggccactacgccgagcgcgttggcgccggcgcgccagtgtacctggcggcagtgctggagtacctcaccgctgagatcctggagctggcgggcaatgcggcccgcgacaacaagaagacgcgaatcatcccccgccacctgcagctggccatccgcaacgacgaggagctcaacaagctgctgggcggcgtgacgatcgcccagggaggcgtcctgcccaacatccaggccgtgctgctgcccaagaagaccagcgccaccgtggggccgaaggcgccctcgggcggcaagaaggccacccaggcctcccaggagtactaagagggcccgcgccgcggccggccgccaggcctccccatgccaccacaaaggcccttttaagggccaccaccgccctcatggaaagagctgagccgcttcagactgcggggcaagcgggccgcggctcccttcccctcccctcccctcgcccgccttcgccgcccggcctcgagtccccgcccgcccccgctcccgtcccgcaccgcctgccgcgtcggcctcgggccctgccctgtccgccgtccgccctccggtagggttcgggccttccggatgcggcttgggcgctcttcggggacctccgtggcgcggaagacccgagcctgccggggggaggccggcggcgccgcacctgcccgcctcggcgttcgtgactcagccgccccatcccgagtcgctaaggggctgcggggaggccgcagcaccttctggaagacttggccttccgctctgacgcagggccgaggtgggcagtccaggccgagaggccggcggccctgaaggtgagtgaggccctcggcagctgcagccggggtgtctggtacccccccggcgtggtgcttagcccaggactttcagacgcggccgctggccgggaggctttggtgggagagacgcgatcgccgatttcggtctggcgccccttctgcggccgggacccaggcctttcacatcagctctccctccatcttcattcataggtctgcgctggggccgggacgaagcacttggtaacaggcacatcttcctcccgagtgactgcctcctaggaggacatttaggggagggcagaggcctgcagtttggcttcacggctggctatgtggacagcaagagtcgttttcgcggaagccgactggcagccaggcctgtcgggccccccgacgccgccccatttcccttccagcaaactcaactcggcaatccaagcacctagataccagcacaagtcggttaatccctgtctggactgagcctccgttggcttctgaactggaattctgcagctaacccttccacgactagaaccttaggcattggggagttttagatggactaattttattaaaggattgttttttttttaaaaaaaaaaaaaaaaaaaaaaaaaaaaaaaaaaaaaaaaaaaaaaaaaaaaaaaaaaaa

SEQ ID NO: 191 - DNA, 866 bp, Homo sapiens
gcagtttgaatcgcggtgcgacgaaggagtaggtggtgggatctcaccgtgggtccgattagccttttctctgccttgcttgcttgagcttcagcggaattcgaaatggctggcggtaaggctggaaaggactccggaaaggccaagacaaaggcggtttcccgctcgcagagagccggcttgcagttcccagtgggccgtattcatcgacacctaaaatctaggacgaccagtcatggacgtgtgggcgcgactgccgctgtgtacagcgcagccatcctggagtacctcaccgcagaggtacttgaactggcaggaaatgcatcaaaagacttaaaggtaaagcgtattacccctcgtcacttgcaacttgctattcgtggagatgaagaattggattctctcatcaaggctacaattgctggtggtggtgtcattccacacatccacaaatctctgattgggaagaaaggacaacagaagactgtctaaaggatgcctggattccttgttatctcaggactctaaatactctaacagctgtccagtgttggtgattccagtggactgtatctctgtgaaaaacacaattttgcctttttgtaattctatttgagcaagttggaagtttaattagctttccaaccaaccaaatttctgcattcgagtcttaaccatatttaagtgttactgtggcttcaaagaagctattgattctgaagtagtgggttttgattgagttgactgtttttaaaaaactgtttggattttaattgtgatgcagaagttatagtaacaaacatttggttttgtacagacattatttccactctggtggataagttcaataaaggtcatatcccaaa

SEQ ID NO: 192 - DNA, 1977 bp, Homo sapiens
acacggtctttgagctgagtcgaggtggaccctttgaacgcagtcgccctacagccgctgattccccccgcatcgcctcccgtggaagcccaggcccgcttcgcagctttctccctttgtctcataaccatgtccaccaacgagaatgctaatacaccagctgcccgtcttcacagattcaagaacaagggaaaagacagtacagaaatgaggcgtcgcagaatagaggtcaatgtggagctgaggaaagctaagaaggatgaccagatgctgaagaggagaaatgtaagctcatttcctgatgatgctacttctccgctgcaggaaaaccgcaacaaccagggcactgtaaattggtctgttgatgacattgtcaaaggcataaatagcagcaatgtggaaaatcagctccaagctactcaagctgccaggaaactactttccagagaaaaacagccccccatagacaacataatccgggctggtttgattccgaaatttgtgtccttcttgggcagaactgattgtagtcccattcagtttgaatctgcttgggcactcactaacattgcttctgggacatcagaacaaaccaaggctgtggtagatggaggtgccatcccagcattcatttctctgttggcatctccccatgctcacatcagtgaacaagctgtctgggctctaggaaacattgcaggtgatggctcagtgttccgagacttggttattaagtacggtgcagttgacccactgttggctctccttgcagttcctgatatgtcatctttagcatgtggctacttacgtaatcttacctggacactttctaatctttgccgcaacaagaatcctgcacccccgatagatgctgttgagcagattcttcctaccttagttcggctcctgcatcatgatgatccagaagtattagcagatacctgctgggctatttcctaccttactgatggtccaaatgaacgaattggcatggtggtgaaaacaggagttgtgccccaacttgtgaagcttctaggagcttctgaattgccaattgtgactcctgccctaagagccatagggaatattgtcactggtacagatgaacagactcaggttgtgattgatgcaggagcactcgccgtctttcccagcctgctcaccaaccccaaaactaacattcagaaggaagctacgtggacaatgtcaaacatcacagccggccgccaggaccagatacagcaagttgtgaatcatggattagtcccattccttgtcagtgttctctctaaggcagattttaagacacaaaaggaagctgtgtgggccgtgaccaactataccagtggtggaacagttgaacagattgtgtaccttgttcactgtggcataatagaaccgttgatgaacctcttaactgcaaaagataccaagattattctggttatcctggatgccatttcaaatatctttcaggctgctgagaaactaggtgaaactgagaaacttagtataatgattgaagaatgtggaggcttagacaaaattgaagctctacaaaaccatgaaaatgagtctgtgtataaggcttcgttaagcttaattgagaagtatttctctgtagaggaagaggaagatcaaaacgttgtaccagaaactacctctgaaggctacactttccaagttcaggatggggctcctgggacctttaacttttagatcatgtagctgagacataaatttgttgtgtactacgtttggtattttgtcttattgtttctctactaagaactctttcttaaatgtggtttgttactgtagcactttttacactgaaactatacttgaacagttccaactgtacatacatactgtatgaagcttgtcctctgactaggtttctaatttctatgtggaatttcctatcttgcagcatcctgtaaataaacattcaagtccacccttttcttgacttca

SEQ ID NO: 193 - DNA, 12716 bp, Homo sapiens
agaaggaagtggagggctgacgctgcgggcgggcgggcgggcgggaggactcgactcggtgggagccgctagagccgggcgcccggggacgtagcctgtagggccaccgggtccccgtcagaggcggcggcgggagcagcggggactgcaggccggggtgcagcgaacgcgaccccgcgggctgcggcccggtgtgtgcggagcgtggcgggcgcagcttaccgggcggaggtgagcgcggcgccggctcctcctgcggcggactttgggtgcgacttgacgagcggtggttcgacaagtggccttgcgggccggatcgtcccagtggaagagttgtaaatttgcttctggccttcccctacggattatacctggccttcccctacggattatactcaacttactgtttagaaaatgtggcccacgagacgcctggttactatcaaaaggagcggggtcgacggtccccactttcccctgagcctcagcacctgcttgtttggaaggggtattgaatgtgacatccgtatccagcttcctgttgtgtcaaaacaacattgcaaaattgaaatccatgagcaggaggcaatattacataatttcagttccacaaatccaacacaagtaaatgggtctgttattgatgagcctgtacggctaaaacatggagatgtaataactattattgatcgttccttcaggtatgaaaatgaaagtcttcagaatggaaggaagtcaactgaatttccaagaaaaatacgtgaacaggagccagcacgtcgtgtctcaagatctagcttctcttctgaccctgatgagaaagctcaagattccaaggcctattcaaaaatcactgaaggaaaagtttcaggaaatcctcaggtacatatcaagaatgtcaaagaagacagtaccgcagatgactcaaaagacagtgttgctcagggaacaactaatgttcattcctcagaacatgctggacgtaatggcagaaatgcagctgatcccatttctggggattttaaagaaatttccagcgttaaattagtgagccgttatggagaattgaagtctgttcccactacacaatgtcttgacaatagcaaaaaaaatgaatctcccttttggaagctttatgagtcagtgaagaaagagttggatgtaaaatcacaaaaagaaaatgtcctacagtattgtagaaaatctggattacaaactgattacgcaacagagaaagaaagtgctgatggtttacagggggagacccaactgttggtctcgcgtaagtcaagaccaaaatctggtgggagcggccacgctgtggcagagcctgcttcacctgaacaagagcttgaccagaacaaggggaagggaagagacgtggagtctgttcagactcccagcaaggctgtgggcgccagctttcctctctatgagccggctaaaatgaagacccctgtacaatattcacagcaacaaaattctccacaaaaacataagaacaaagacctgtatactactggtagaagagaatctgtgaatctgggtaaaagtgaaggcttcaaggctggtgataaaactcttactcccaggaagctttcaactagaaatcgaacaccagctaaagttgaagatgcagctgactctgccactaagccagaaaatctctcttccaaaaccagaggaagtattcctacagatgtggaagttctgcctacggaaactgaaattcacaatgagccatttttaactctgtggctcactcaagttgagaggaagatccaaaaggattccctcagcaagcctgagaaattgggcactacagctggacagatgtgctctgggttacctggtcttagttcagttgatatcaacaactttggtgattccattaatgagagtgagggaatacctttgaaaagaaggcgtgtgtcctttggtgggcacctaagacctgaactatttgatgaaaacttgcctcctaatacgcctctcaaaaggggagaagccccaaccaaaagaaagtctctggtaatgcacactccacctgtcctgaagaaaatcatcaaggaacagcctcaaccatcaggaaaacaagagtcaggttcagaaatccatgtggaagtgaaggcacaaagcttggttataagccctccagctcctagtcctaggaaaactccagttgccagtgatcaacgccgtaggtcctgcaaaacagcccctgcttccagcagcaaatctcagacagaggttcctaagagaggagggagaaagagtggcaacctgccttcaaagagagtgtctatcagccgaagtcaacatgatattttacagatgatatgttccaaaagaagaagtggtgcttcggaagcaaatctgattgttgcaaaatcatgggcagatgtagtaaaacttggtgcaaaacaaacacaaactaaagtcataaaacatggtcctcaaaggtcaatgaacaaaaggcaaagaagacctgctactccaaagaagcctgtgggcgaagttcacagtcaatttagtacaggccacgcaaactctccttgtaccataataatagggaaagctcatactgaaaaagtacatgtgcctgctcgaccctacagagtgctcaacaacttcatttccaaccaaaaaatggactttaaggaagatctttcaggaatagctgaaatgttcaagaccccagtgaaggagcaaccgcagttgacaagcacatgtcacatcgctatttcaaattcagagaatttgcttggaaaacagtttcaaggaactgattcaggagaagaacctctgctccccacctcagagagttttggaggaaatgtgttcttcagtgcacagaatgcagcaaaacagccatctgataaatgctctgcaagccctcccttaagacggcagtgtattagagaaaatggaaacgtagcaaaaacgcccaggaacacctacaaaatgacttctctggagacaaaaacttcagatactgagacagagccttcaaaaacagtatccactgcaaacaggtcaggaaggtctacagagttcaggaatatacagaagctacctgtggaaagtaagagtgaagaaacaaatacagaaattgttgagtgcatcctaaaaagaggtcagaaggcaacactactacaacaaaggagagaaggagagatgaaggaaatagaaagaccttttgagacatataaggaaaatattgaattaaaagaaaacgatgaaaagatgaaagcaatgaagagatcaagaacttgggggcagaaatgtgcaccaatgtctgacctgacagacctcaagagcttgcctgatacagaactcatgaaagacacggcacgtggccagaatctcctccaaacccaagatcatgccaaggcaccaaagagtgagaaaggcaaaatcactaaaatgccctgccagtcattacaaccagaaccaataaacaccccaacacacacaaaacaacagttgaaggcatccctggggaaagtaggtgtgaaagaagagctcctagcagtcggcaagttcacacggacgtcaggggagaccacgcacacgcacagagagccagcaggagatggcaagagcatcagaacgtttaaggagtctccaaagcagatcctggacccagcagcccgtgtaactggaatgaagaagtggccaagaacgcctaaggaagaggcccagtcactagaagacctggctggcttcaaagagctcttccagacaccaggtccctctgaggaatcaatgactgatgagaaaactaccaaaatagcctgcaaatctccaccaccagaatcagtggacactccaacaagcacaaagcaatggcctaagagaagtctcaggaaagcagatgtagaggaagaattcttagcactcaggaaactaacaccatcagcagggaaagccatgcttacgcccaaaccagcaggaggtgatgagaaagacattaaagcatttatgggaactccagtgcagaaactggacctggcaggaactttacctggcagcaaaagacagctacagactcctaaggaaaaggcccaggctctagaagacctggctggctttaaagagctcttccagactcctggtcacaccgaggaattagtggctgctggtaaaaccactaaaataccctgcgactctccacagtcagacccagtggacaccccaacaagcacaaagcaacgacccaagagaagtatcaggaaagcagatgtagagggagaactcttagcgtgcaggaatctaatgccatcagcaggcaaagccatgcacacgcctaaaccatcagtaggtgaagagaaagacatcatcatatttgtgggaactccagtgcagaaactggacctgacagagaacttaaccggcagcaagagacggccacaaactcctaaggaagaggcccaggctctggaagacctgactggctttaaagagctcttccagacccctggtcatactgaagaagcagtggctgctggcaaaactactaaaatgccctgcgaatcttctccaccagaatcagcagacaccccaacaagcacaagaaggcagcccaagacacctttggagaaaagggacgtacagaaggagctctcagccctgaagaagctcacacagacatcaggggaaaccacacacacagataaagtaccaggaggtgaggataaaagcatcaacgcgtttagggaaactgcaaaacagaaactggacccagcagcaagtgtaactggtagcaagaggcacccaaaaactaaggaaaaggcccaacccctagaagacctggctggcttgaaagagctcttccagacaccagtatgcactgacaagcccacgactcacgagaaaactaccaaaatagcctgcagatcacaaccagacccagtggacacaccaacaagctccaagccacagtccaagagaagtctcaggaaagtggacgtagaagaagaattcttcgcactcaggaaacgaacaccatcagcaggcaaagccatgcacacacccaaaccagcagtaagtggtgagaaaaacatctacgcatttatgggaactccagtgcagaaactggacctgacagagaacttaactggcagcaagagacggctacaaactcctaaggaaaaggcccaggctctagaagacctggctggctttaaagagctcttccagacacgaggtcacactgaggaatcaatgactaacgataaaactgccaaagtagcctgcaaatcttcacaaccagacccagacaaaaacccagcaagctccaagcgacggctcaagacatccctggggaaagtgggcgtgaaagaagagctcctagcagttggcaagctcacacagacatcaggagagactacacacacacacacagagccaacaggagatggtaagagcatgaaagcatttatggagtctccaaagcagatcttagactcagcagcaagtctaactggcagcaagaggcagctgagaactcctaagggaaagtctgaagtccctgaagacctggccggcttcatcgagctcttccagacaccaagtcacactaaggaatcaatgactaacgaaaaaactaccaaagtatcctacagagcttcacagccagacctagtggacaccccaacaagctccaagccacagcccaagagaagtctcaggaaagcagacactgaagaagaatttttagcatttaggaaacaaacgccatcagcaggcaaagccatgcacacacccaaaccagcagtaggtgaagagaaagacatcaacacgtttttgggaactccagtgcagaaactggaccagccaggaaatttacctggcagcaatagacggctacaaactcgtaaggaaaaggcccaggctctagaagaactgactggcttcagagagcttttccagacaccatgcactgataaccccacgactgatgagaaaactaccaaaaaaatactctgcaaatctccgcaatcagacccagcggacaccccaacaaacacaaagcaacggcccaagagaagcctcaagaaagcagacgtagaggaagaatttttagcattcaggaaactaacaccatcagcaggcaaagccatgcacacgcctaaagcagcagtaggtgaagagaaagacatcaacacatttgtggggactccagtggagaaactggacctgctaggaaatttacctggcagcaagagacggccacaaactcctaaagaaaaggccaaggctctagaagatctggctggcttcaaagagctcttccagacaccaggtcacactgaggaatcaatgaccgatgacaaaatcacagaagtatcctgcaaatctccacaaccagacccagtcaaaaccccaacaagctccaagcaacgactcaagatatccttggggaaagtaggtgtgaaagaagaggtcctaccagtcggcaagctcacacagacgtcagggaagaccacacagacacacagagagacagcaggagatggaaagagcatcaaagcgtttaaggaatctgcaaagcagatgctggacccagcaaactatggaactgggatggagaggtggccaagaacacctaaggaagaggcccaatcactagaagacctggccggcttcaaagagctcttccagacaccagaccacactgaggaatcaacaactgatgacaaaactaccaaaatagcctgcaaatctccaccaccagaatcaatggacactccaacaagcacaaggaggcggcccaaaacacctttggggaaaagggatatagtggaagagctctcagccctgaagcagctcacacagaccacacacacagacaaagtaccaggagatgaggataaaggcatcaacgtgttcagggaaactgcaaaacagaaactggacccagcagcaagtgtaactggtagcaagaggcagccaagaactcctaagggaaaagcccaacccctagaagacttggctggcttgaaagagctcttccagacaccaatatgcactgacaagcccacgactcatgagaaaactaccaaaatagcctgcagatctccacaaccagacccagtgggtaccccaacaatcttcaagccacagtccaagagaagtctcaggaaagcagacgtagaggaagaatccttagcactcaggaaacgaacaccatcagtagggaaagctatggacacacccaaaccagcaggaggtgatgagaaagacatgaaagcatttatgggaactccagtgcagaaattggacctgccaggaaatttacctggcagcaaaagatggccacaaactcctaaggaaaaggcccaggctctagaagacctggctggcttcaaagagctcttccagacaccaggcactgacaagcccacgactgatgagaaaactaccaaaatagcctgcaaatctccacaaccagacccagtggacaccccagcaagcacaaagcaacggcccaagagaaacctcaggaaagcagacgtagaggaagaatttttagcactcaggaaacgaacaccatcagcaggcaaagccatggacacaccaaaaccagcagtaagtgatgagaaaaatatcaacacatttgtggaaactccagtgcagaaactggacctgctaggaaatttacctggcagcaagagacagccacagactcctaaggaaaaggctgaggctctagaggacctggttggcttcaaagaactcttccagacaccaggtcacactgaggaatcaatgactgatgacaaaatcacagaagtatcctgtaaatctccacagccagagtcattcaaaacctcaagaagctccaagcaaaggctcaagatacccctggtgaaagtggacatgaaagaagagcccctagcagtcagcaagctcacacggacatcaggggagactacgcaaacacacacagagccaacaggagatagtaagagcatcaaagcgtttaaggagtctccaaagcagatcctggacccagcagcaagtgtaactggtagcaggaggcagctgagaactcgtaaggaaaaggcccgtgctctagaagacctggttgacttcaaagagctcttctcagcaccaggtcacactgaagagtcaatgactattgacaaaaacacaaaaattccctgcaaatctcccccaccagaactaacagacactgccacgagcacaaagagatgccccaagacacgtcccaggaaagaagtaaaagaggagctctcagcagttgagaggctcacgcaaacatcagggcaaagcacacacacacacaaagaaccagcaagcggtgatgagggcatcaaagtattgaagcaacgtgcaaagaagaaaccaaacccagtagaagaggaacccagcaggagaaggccaagagcacctaaggaaaaggcccaacccctggaagacctggccggcttcacagagctctctgaaacatcaggtcacactcaggaatcactgactgctggcaaagccactaaaataccctgcgaatctcccccactagaagtggtagacaccacagcaagcacaaagaggcatctcaggacacgtgtgcagaaggtacaagtaaaagaagagccttcagcagtcaagttcacacaaacatcaggggaaaccacggatgcagacaaagaaccagcaggtgaagataaaggcatcaaagcattgaaggaatctgcaaaacagacaccggctccagcagcaagtgtaactggcagcaggagacggccaagagcacccagggaaagtgcccaagccatagaagacctagctggcttcaaagacccagcagcaggtcacactgaagaatcaatgactgatgacaaaaccactaaaataccctgcaaatcatcaccagaactagaagacaccgcaacaagctcaaagagacggcccaggacacgtgcccagaaagtagaagtgaaggaggagctgttagcagttggcaagctcacacaaacctcaggggagaccacgcacaccgacaaagagccggtaggtgagggcaaaggcacgaaagcatttaagcaacctgcaaagcggaagctggacgcagaagatgtaattggcagcaggagacagccaagagcacctaaggaaaaggcccaacccctggaagatctggccagcttccaagagctctctcaaacaccaggccacactgaggaactggcaaatggtgctgctgatagctttacaagcgctccaaagcaaacacctgacagtggaaaacctctaaaaatatccagaagagttcttcgggcccctaaagtagaacccgtgggagacgtggtaagcaccagagaccctgtaaaatcacaaagcaaaagcaacacttccctgcccccactgcccttcaagaggggaggtggcaaagatggaagcgtcacgggaaccaagaggctgcgctgcatgccagcaccagaggaaattgtggaggagctgccagccagcaagaagcagagggttgctcccagggcaagaggcaaatcatccgaacccgtggtcatcatgaagagaagtttgaggacttctgcaaaaagaattgaacctgcggaagagctgaacagcaacgacatgaaaaccaacaaagaggaacacaaattacaagactcggtccctgaaaataagggaatatccctgcgctccagacgccaaaataagactgaggcagaacagcaaataactgaggtctttgtattagcagaaagaatagaaataaacagaaatgaaaagaagcccatgaagacctccccagagatggacattcagaatccagatgatggagcccggaaacccatacctagagacaaagtcactgagaacaaaaggtgcttgaggtctgctagacagaatgagagctcccagcctaaggtggcagaggagagcggagggcagaagagtgcgaaggttctcatgcagaatcagaaagggaaaggagaagcaggaaattcagactccatgtgcctgagatcaagaaagacaaaaagccagcctgcagcaagcactttggagagcaaatctgtgcagagagtaacgcggagtgtcaagaggtgtgcagaaaatccaaagaaggctgaggacaatgtgtgtgtcaagaaaataagaaccagaagtcatagggacagtgaagatatttgacagaaaaatcgaactgggaaaaatataataaagttagttttgtgataagttctagtgcagtttttgtcataaattacaagtgaattctgtaagtaaggctgtcagtctgcttaagggaagaaaactttggatttgctgggtctgaatcggcttcataaactccactgggagcactgctgggctcctggactgagaatagttgaacaccgggggctttgtgaaggagtctgggccaaggtttgccctcagctttgcagaatgaagccttgaggtctgtcaccacccacagccaccctacagcagccttaactgtgacacttgccacactgtgtcgtcgtttgtttgcctatgtcctccagggcacggtggcaggaacaactatcctcgtctgtcccaacactgagcaggcactcggtaaacacgaatgaatggatgagcgcacggatgaatggagcttacaagatctgtctttccaatggccgggggcatttggtccccaaattaaggctattggacatctgcacaggacagtcctatttttgatgtcctttcctttctgaaaataaagttttgtgctttggagaatgactcgtgagcacatctttagggaccaagagtgactttctgtaaggagtgactcgtggcttgccttggtctcttgggaatacttttctaactagggttgctctcacctgagacattctccacccgcggaatctcagggtcccaggctgtgggccatcacgacctcaaactggctcctaatctccagctttcctgtcattgaaagcttcggaagtttactggctctgctcccgcctgttttctttctgactctatctggcagcccgatgccacccagtacaggaagtgacaccagtactctgtaaagcatcatcatccttggagagactgagcactcagcaccttcagccacgatttcaggatcgcttccttgtgagccgctgcctccgaaatctcctttgaagcccagacatctttctccagcttcagacttgtagatataactcgttcatcttcatttactttccactttgccccctgtcctctctgtgttccccaaatcagagaatagcccgccatcccccaggtcacctgtctggattcctccccattcacccaccttgccaggtgcaggtgaggatggtgcaccagacagggtagctgtcccccaaaatgtgccctgtgcgggcagtgccctgtctccacgtttgtttccccagtgtctggcggggagccaggtgacatcataaatacttgctgaatgaatgcagaaatcagcggtactgacttgtactatattggctgccatgatagggttctcacagcgtcatccatgatcgtaagggagaatgacattctgcttgagggagggaatagaaaggggcagggaggggacatctgagggcttcacagggctgcaaagggtacagggattgcaccagggcagaacaggggagggtgttcaaggaagagtggctcttagcagaggcactttggaaggtgtgaggcataaatgcttccttctacgtaggccaacctcaaaactttcagtaggaatgttgctatgatcaagttgttctaacactttagacttagtagtaattatgaacctcacatagaaaaatttcatccagccatatgcctgtggagtggaatattctgtttagtagaaaaatcctttagagttcagctctaaccagaaatcttgctgaagtatgtcagcaccttttctcaccctggtaagtacagtatttcaagagcacgctaagggtggttttcattttacagggctgttgatgatgggttaaaaatgttcatttaagggctacccccgtgtttaatagatgaacaccacttctacacaaccctccttggtactgggggagggagagatctgacaaatactgcccattcccctaggctgactggatttgagaacaaatacccacccatttccaccatggtatggtaacttctctgagcttcagtttccaagtgaatttccatgtaataggacattcccattaaatacaagctgtttttactttttcgcctcccagggcctgtgggatctggtcccccagcctctcttgggctttcttacactaactctgtacctaccatctcctgcctcccttaggcaggcacctccaaccaccacacactccctgctgttttccctgcctggaactttccctcctgccccaccaagatcatttcatccagtcctgagctcagcttaagggaggcttcttgcctgtgggttccctcacccccatgcctgtcctccaggctggggcaggttcttagtttgcctggaattgttctgtacctctttgtagcacgtagtgttgtggaaactaagccactaattgagtttctggctcccctcctggggttgtaagttttgttcattcatgagggccgactgcatttcctggttactctatcccagtgaccagccacaggagatgtccaataaagtatgtgatgaaatggtcttaaaa

SEQ ID NO: 194 - DNA, 2668 bp, Homo sapiens
gactgcagttcctgcgagcgaggagcgcgggacctgctgacacgctgacgccttcgagcgcggcccggggcccggagcggccggagcagcccgggtcctgaccccggcccggctcccgctccgggctctgccggcgggcgggcgagcgcggcgcggtccgggccggggggatgtctcggcggacgcgctgcgaggatctggatgagctgcactaccaggacacagattcagatgtgccggagcagagggatagcaagtgcaaggtcaaatggacccatgaggaggacgagcagctgagggccctggtgaggcagtttggacagcaggactggaagttcctggccagccacttccctaaccgcactgaccagcaatgccagtacaggtggctgagagttttgaatccagaccttgtcaaggggccatggaccaaagaggaagaccaaaaagtcatcgagctggttaagaagtatggcacaaagcagtggacactgattgccaagcacctgaagggccggctggggaagcagtgccgtgaacgctggcacaaccacctcaaccctgaggtgaagaagtcttgctggaccgaggaggaggaccgcatcatctgcgaggcccacaaggtgctgggcaaccgctgggccgagatcgccaagatgttgccagggaggacagacaatgctgtgaagaatcactggaactctaccatcaaaaggaaggtggacacaggaggcttcttgagcgagtccaaagactgcaagcccccagtgtacttgctgctggagctcgaggacaaggacggcctccagagtgcccagcccacggaaggccagggaagtcttctgaccaactggccctccgtccctcctaccataaaggaggaggaaaacagtgaggaggaacttgcagcagccaccacatcgaaggaacaggagcccatcggtacagatctggacgcagtgcgaacaccagagcccttggaggaattcccgaagcgtgaggaccaggaaggctccccaccagaaacgagcctgccttacaagtgggtggtggaggcagctaacctcctcatccctgctgtgggttctagcctctctgaagccctggacttgatcgagtcggaccctgatgcttggtgtgacctgagtaaatttgacctccctgaggaaccatctgcagaggacagtatcaacaacagcctagtgcagctgcaagcgtcacatcagcagcaagtcctgccaccccgccagccttccgccctggtgcccagtgtgaccgagtaccgcctggatggccacaccatctcagacctgagccggagcagccggggcgagctgatccccatctcccccagcactgaagtcgggggctctggcattggcacaccgccctctgtgctcaagcggcagaggaagaggcgtgtggctctgtcccctgtcactgagaatagcaccagtctgtccttcctggattcctgtaacagcctcacgcccaagagcacacctgttaagaccctgcccttctcgccctcccagtttctgaacttctggaacaaacaggacacattggagctggagagcccctcgctgacatccaccccagtgtgcagccagaaggtggtggtcaccacaccactgcaccgggacaagacacccctgcaccagaaacatgctgcgtttgtaaccccagatcagaagtactccatggacaacactccccacacgccaaccccgttcaagaacgccctggagaagtacggacccctgaagcccctgccacagaccccgcacctggaggaggacttgaaggaggtgctgcgttctgaggctggcatcgaactcatcatcgaggacgacatcaggcccgagaagcagaagaggaagcctgggctgcggcggagccccatcaagaaagtccggaagtctctggctcttgacattgtggatgaggatgtgaagctgatgatgtccacactgcccaagtctctatccttgccgacaactgccccttcaaactcttccagcctcaccctgtcaggtatcaaagaagacaacagcttgctcaaccagggcttcttgcaggccaagcccgagaaggcagcagtggcccagaagccccgaagccacttcacgacacctgcccctatgtccagtgcctggaagacggtggcctgcggggggaccagggaccagcttttcatgcaggagaaagcccggcagctcctgggccgcctgaagcccagccacacatctcggaccctcatcttgtcctgaggtgttgagggtgtcacgagcccattctcatgtttacaggggttgtgggggcagagggggtctgtgaatctgagagtcattcaggtgacctcctgcagggagccttctgccaccagcccctccccagactctcaggtggaggcaacagggccatgtgctgccctgttgccgagcccagctgtgggcggctcctggtgctaacaacaaagttccacttccaggtctgcctggttccctccccaaggccacagggagctccgtcagcttctcccaagcccacgtcaggcctggcctcatctcagaccctgcttaggatgggggatgtggccaggggtgctcctgtgctcaccctctcttggtgcatttttttggaagaataaaattgcctctctctt

SEQ ID NO: 195 - DNA, 1248 bp, Homo sapiens
gcagagcttttgaaaggcggcgggaggcggcgagcgccatggccagtccgggctgcctgctgtgcgtgctgggcctgctactctgcggggcggcgagcctcgagctgtctagaccccacggcgacaccgccaagaagcccatcatcggaatattaatgcaaaaatgccgtaataaagtcatgaaaaactatggaagatactatattgctgcgtcctatgtaaagtacttggagtctgcaggtgcgagagttgtaccagtaaggctggatcttacagagaaagactatgaaatacttttcaaatctattaatggaatccttttccctggaggaagtgttgacctcagacgctcagattatgctaaagtggccaaaatattttataacttgtccatacagagttttgatgatggagactattttcctgtgtggggcacatgccttggatttgaagagctttcactgctgattagtggagagtgcttattaactgccacagatactgttgacgtggcaatgccgctgaacttcactggaggtcaattgcacagcagaatgttccagaattttcctactgagttgttgctgtcattagcagtagaacctctgactgccaatttccataagtggagcctctccgtgaagaattttacaatgaatgaaaagttaaagaagtttttcaatgtcttaactacaaatacagatggcaagattgagtttatttcaacaatggaaggatataagtatccagtatatggtgtccagtggcatccagagaaagcaccttatgagtggaagaatttggatggcatttcccatgcacctaatgctgtgaaaaccgcattttatttagcagagttttttgttaatgaagctcggaaaaacaaccatcattttaaatctgaatctgaagaggagaaagcattgatttatcagttcagtccaatttatactggaaatatttcttcatttcagcaatgttacatatttgattgaaagtcttcaatttgttaacagagcaaatttgaataattccatgattaaactgttagaataacttgctactcatggcaagattaggaagtcacagattcttttctataatgtgcctggctctgattcttcattctgtatgtgactatttatataacattagataattaaatagtgagacataaatagagtgtttttcatggaaaagccttcttatatctgaagattgaaaaaaataaatttactgaaatacaaa

SEQ ID NO: 196 - DNA, 715 bp, Homo sapiens
accgcggcctcagatgaatgcggctgttaagacctgcaataatccagaatggctactctgatctatgttgataaggaaaatggagaaccaggcacccgtgtggttgctaaggatgggctgaagctggggtctggaccttcaatcaaagccttagatgggagatctcaagtttcaacaccacgttttggcaaaacgttcgatgccccaccagccttacctaaagctactagaaaggctttgggaactgtcaacagagctacagaaaagtctgtaaagaccaagggacccctcaaacaaaaacagccaagcttttctgccaaaaagatgactgagaagactgttaaagcaaaaagctctgttcctgcctcagatgatgcctatccagaaatagaaaaattctttcccttcaatcctctagactttgagagttttgacctgcctgaagagcaccagattgcgcacctccccttgagtggagtgcctctcatgatccttgacgaggagagagagcttgaaaagctgtttcagctgggccccccttcacctgtgaagatgccctctccaccatgggaatccaatctgttgcagtctccttcaagcattctgtcgaccctggatgttgaattgccacctgtttgctgtgacatagatatttaaatttcttagtgcttcagagtttgtgtgtatttgtattaataaagcattctttaacaga

SEQ ID NO: 197 - DNA, 3797 bp, Homo sapiens
tgcgcagcggcgggggttgttccggctgcctttcactgaggggacccgccagtttctaactcagtggcgtttgccctgattcccggggcctggctttcagcgtagcaattctgccggcgaagaaggtgagcgcagtgctgtgtggcagcagagctccttaggacgaggagcagcgggacgaggaagggcagactggtgaaatcgcaaactgggcgtctgttccggcgccggacccctatttgcaaaggtccatggctaatgaaacacagaaggttggtgccatccattttccttttcccttcacaccctattccatccaggaagacttcatggcagagctgtaccgggttttggaggctggcaagattgggatatttgagagtccaactggcactgggaagtccttaagtcttatttgtggggccctctcttggctccgtgactttgaacagaagaagcgtgaagaagaggcacgactccttgaaactggaactggccccttacatgatgagaaagatgaatccctgtgtctgtcttcttcctgcgaaggggctgcaggcaccccgaggcctgctggagaaccggcctgggttactcagtttgtgcagaagaaagaagagagggacctggtggaccgactaaaggcggagcaggccaggaggaagcagcgagaagaacgcctgcagcagctgcagcacagggtgcagctcaagtatgcagccaagcgcctgaggcaggaagaagaagaaagagagaatctcctccgcctcagcagggagatgctagagacaggcccggaggctgagcggctggagcagctggagtctggggaggaggagctggtcctcgccgaatacgagagtgatgaggagaaaaaggtggcgagcagagtggatgaggatgaggatgacctggaggaagaacacataactaagatttattactgtagtcggacacactcccagctggcccagtttgtgcatgaggtgaagaagagcccctttggcaaggatgttcggctggtctcccttggctcccggcagaacctttgtgtaaatgaagacgtgaaaagcctaggttctgtgcagcttatcaacgaccgctgtgtggacatgcagagaagcaggcacgagaagaagaaaggagctgaggaggagaagccaaagaggaggaggcaggagaagcaggcagcctgccccttctacaaccacgagcagatgggccttctccgggatgaggccctggcagaggtgaaggacatggagcagctgctggcccttgggaaggaggcccgggcctgtccctattacgggagccgccttgccatccctgcagcccagctggtggtgctgccctatcagatgctgctgcatgcggccactcggcaggccgcgggcatccggctgcaggaccaggtggtgatcatcgacgaggcgcacaacctgatcgacaccatcacgggcatgcacagcgtggaggtcagcggctcccagctctgccaggcccattcccagctgctgcagtacgtggagcgatacgggaagcgtttgaaggccaagaacctgatgtacctgaagcagatcctgtatttgctggagaaattcgtggctgtgctaggggggaacattaagcaaaatcccaatacacagagtctgtcacagacagggacggagctgaagaccatcaacgactttctcttccagagccagatcgacaacatcaacctgttcaaggtgcagcgatactgtgagaagagcatgatcagcagaaagctctttggattcactgaacggtacggagcagtgttctcatcccgggagcagcccaaactggctgggtttcagcaattcctgcagagcctgcagcccaggacgactgaagctcttgcagcccctgcagacgagagtcaggccagcaccctgcgaccagcttctccactgatgcacatccaaggcttcctggcagctctcactacggccaaccaggacggcagggtcatcctgagccgccaaggcagcctcagtcagagcaccctgaagtttttgctcctgaatccagctgtgcactttgcccaagtggtgaaggaatgccgggcagtggtcattgcggggggtaccatgcagccggtgtctgacttccggcagcagctgctggcctgtgccggggtggaagctgagcgcgtggtggagttttcctgtggtcacgtgatccctccagacaacatcctgcccctcgtcatctgcagcgggatctccaaccagccgctggaattcacgttccagaaaagagagctgcctcagatgatattccaggaacctaagagcgcacaccaggtggagcaggtgctgctggcatattccaggtgcatccaggcctgtggccaggagagaggccaggtgacaggggccctgctcctctctgtggttggaggaaagatgagtgaagggatcaacttctctgacaacctaggccggtgtgtggtgatggtgggcatgcccttccccaacatcaggtctgcagagctgcaggagaagatggcctacttggatcaaaccctccccagagcccccggccaggcacccccagggaaggctctggtggagaacctgtgcatgaaggccgtcaaccagtccataggcagggccatcaggcaccagaaggattttgccagcgtagtgctcctggaccagcgatatgcccggccccctgtcctggccaagctgccggcctggatccgagcccgtgtggaggtcaaagctacctttggccccgccattgctgctgtgcagaagtttcaccgggagaagtcggcctcttcctgatgggcaaccacaccactgcctggcgccgtgcccttcctttgtcctgcccgctggagacagtgtttgtcgtgggcgtggtctgcggggatcctgttacaaaggtgaaacccaggaggagagtgtggagtccagagtgctgccaggacccaggcacaggcgttagctcccgtaggagaaaatgggggaatcctgaatgaacagtgggtcctggctgtccttggggcgttccagggcagctcccctcctggaatagaatctttctttccatcctgcatggctgagagccaggcttccttcctggtctccgcaggaggctgtggcagctgtggcatccactgtggcatctccgtcctgcccaccttcttaagaggcgagatggagcaggcccatctgcctctgccctttctagccaaggttatagctgccctggactgctcactctctggtctcaatttaaaatgatccatggccacagggctcctgcccaggggcttgtcaccttcccctcctccttcctgagtcactccttcagtagaaggccctgctccctatcctgtcccacagccctgcctggatttgtatccttggcttcgtgccagttcctccaagtctatggcacctccctccctctcaaccacttgagcaaactccaagacaccttctaccccaacaccagcaattatgccaagggccgttaggctctcaacatgactatagagaccccgtgtcatcacggagacctttgttcctgtgggaaaatatccctcccacctgcaacagctgcccctgctgactgcgcctgtcttctccctctgaccccagagaaaggggctgtggtcagctgggatcttctgccaccatcagggacaaacgggggcaggaggaaagtcactgatgcccagatgtttgcatcctgcacagctataggtccttaaataaaagtgtgctgttggttaaaaaaaaaaaaaaaaaaaa

SEQ ID NO: 198 - DNA, 1488 bp, Homo sapiens
gaagatccccagcgctgcgggctcggagagcagtcctaacggcgcctcgtacgctagtgtcctcccttttcagtccgcgtccctccctgggccgggctggcactcttgccttccccgtccctcatggcgctgctccgacgcccgacggtgtccagtgatttggagaatattgacacaggagttaattctaaagttaagagtcatgtgactattaggcgaactgttttagaagaaattggaaatagagttacaaccagagcagcacaagtagctaagaaagctcagaacaccaaagttccagttcaacccaccaaaacaacaaatgtcaacaaacaactgaaacctactgcttctgtcaaaccagtacagatggaaaagttggctccaaagggtccttctcccacacctgaggatgtctccatgaaggaagagaatctctgccaagctttttctgatgccttgctctgcaaaatcgaggacattgataacgaagattgggagaaccctcagctctgcagtgactacgttaaggatatctatcagtatctcaggcagctggaggttttgcagtccataaacccacatttcttagatggaagagatataaatggacgcatgcgtgccatcctagtggattggctggtacaagtccactccaagtttaggcttctgcaggagactctgtacatgtgcgttggcattatggatcgatttttacaggttcagccagtttcccggaagaagcttcaattagttgggattactgctctgctcttggcttccaagtatgaggagatgttttctccaaatattgaagactttgtttacatcacagacaatgcttataccagttcccaaatccgagaaatggaaactctaattttgaaagaattgaaatttgagttgggtcgacccttgccactacacttcttaaggcgagcatcaaaagccggggaggttgatgttgaacagcacactttagccaagtatttgatggagctgactctcatcgactatgatatggtgcattatcatccttctaaggtagcagcagctgcttcctgcttgtctcagaaggttctaggacaaggaaaatggaacttaaagcagcagtattacacaggatacacagagaatgaagtattggaagtcatgcagcacatggccaagaatgtggtgaaagtaaatgaaaacttaactaaattcatcgccatcaagaataagtatgcaagcagcaaactcctgaagatcagcatgatccctcagctgaactcaaaagccgtcaaagaccttgcctccccactgataggaaggtcctaggctgccgtggcccctggggatgtgtgcttcattgtgccctttttcttattggtttagaactcttgattttgtacatagtcctctggtctatctcatgaaacctcttctcagaccagttttctaaacatatattgaggaaaaataaagcgattggtttttcttaaggta

SEQ ID NO: 199 - DNA, 777 bp, Homo sapiens
gcagttgcagtcgtgttctccgagttcctgtctctctgccaacgccgcccggatggcttcccaaaaccgcgacccagccgccactagcgtcgccgccgcccgtaaaggagctgagccgagcgggggcgccgcccggggtccggtgggcaaaaggctacagcaggagctgatgaccctcatgatgtctggcgataaagggatttctgccttccctgaatcagacaaccttttcaaatgggtagggaccatccatggagcagctggaacagtatatgaagacctgaggtataagctctcgctagagttccccagtggctacccttacaatgcgcccacagtgaagttcctcacgccctgctatcaccccaacgtggacacccagggtaacatatgcctggacatcctgaaggaaaagtggtctgccctgtatgatgtcaggaccattctgctctccatccagagccttctaggagaacccaacattgatagtcccttgaacacacatgctgccgagctctggaaaaaccccacagcttttaagaagtacctgcaagaaacctactcaaagcaggtcaccagccaggagccctgacccaggctgcccagcctgtccttgtgtcgtctttttaatttttccttagatggtctgtcctttttgtgatttctgtataggactctttatcttgagctgtggtatttttgttttgtttttgtcttttaaattaagcctcggttgagcccttgtatattaaataaatgcatttttgtcctttttta

SEQ ID NO: 200 - DNA, 5547 bp, Homo sapiens
agaattcggagcgcggaagagccagagctgcgagcgcctggagctggatctctctccggtcgcgcacgccgaggccagtagggagagaagatggtggttctccgcagcagcttggagctgcacaaccactccgcggcctcggccacgggctccttggacctgtccagtgacttcctcagtctggagcacatcggccggaggcggctccgctcggccggcgcggcgcagaagaaacccgcggcgaccacagccaaagcgggcgatgggtcatcagttaaggaagttgaaacctaccaccggacacgtgctttaagatctttgagaaaagatgcacagaattcttcagattctagttttgagaagaatgtggaaataacggagcaacttgctaatggcaggcattttacaaggcagttggccagacagcaggctgataaaaaaaaagaagagcacagagaagacaaagtgattccagttactcggtcattgagggctagaaacatcgttcaaagtacagaacacttacatgaagataatggtgatgttgaagtgcgtcgaagttgtaggattagaagtcgttatagtggtgtaaaccagtccatgctgtttgacaaacttataactaacactgctgaagctgtacttcaaaaaatggatgacatgaagaagatgcgtagacagcgaatgagagaacttgaagacttgggagtgtttaatgaaacagaagaaagcaatcttaatatgtacacaagaggaaaacagaaagatattcaaagaactgatgaagaaacaactgataatcaagaaggcagtgtggagtcatctgaagagggtgaagaccaagaacatgaagatgatggtgaagatgaagatgatgaagatgatgatgatgatgacgatgatgatgatgatgatgatgatgaagatgatgaagatgaagaagatggagaagaagagaatcagaagcgatattatcttagacagagaaaagctactgtttactatcaggctccattggaaaaacctcgtcaccagagaaagcccaacatattttatagtggcccagcttctcctgcaagaccaagataccgattatcttccgcaggaccaagaagtccttactgtaaacgaatgaacaggcgaaggcatgcaatccacagtagtgactcgacttcatcttcctcctctgaagatgaacagcactttgagaggcggaggaaaaggagtcgtaatagggctatcaataggtgcctcccactaaattttcggaaagatgaattaaaaggcatttataaagatcgaatgaaaattggagcaagccttgccgatgttgatccaatgcaactagattcttcagtacgatttgatagtgttggtggcctgtctaatcatatagcagctctaaaagagatggtggtgtttccattactttatccagaagtctttgaaaaatttaaaattcaacccccaagaggttgtttgttttatgggccacctggaactggaaagactctggttgccagagcacttgccaatgagtgcagtcaaggggataaaagagtagcatttttcatgaggaaaggtgctgattgtctaagtaaatgggtaggagaatctgaaagacagctacgattgctgtttgatcaggcctatcagatgcgcccatcaattattttttttgacgaaattgatggtctggctccagtacggtcaagcaggcaagatcagattcacagttctattgtttccaccctgctagctcttatggatggattggacagcagaggggaaattgtggtcattggtgctacgaacaggctagattctatagatcctgctttacgaaggcctggtcgctttgatagagaattcctctttagcctgcctgataaagaggctcgaaaagagattctaaagattcacaccagggattggaatcccaaaccactggacacatttttagaagagctagcagaaaactgtgttggatactgtggagcagatattaaatcaatatgtgctgaagctgctttatgtgctttacgacgacgctacccacagatctataccactagtgagaaactgcagttggatctctcttcaattaatatctcagctaaggatttcgaggtagctatgcaaaagatgataccagcctcccaaagagctgtgacatcacctgggcaggcactgtccaccgttgtgaaaccactcctgcaaaacactgttgacaagattttagaagccctgcagagagtatttccacatgcagaattcagaacaaataaaacattagactcagatatttcttgtcctctgctagaaagtgacttggcttacagtgatgatgatgttccatcagtttatgaaaatggactttctcagaaatcttctcataaggcaaaagacaattttaattttcttcatttgaatagaaatgcttgttaccaacctatgtcttttcgaccaagaatattgatagtaggagaaccaggatttgggcaaggttctcacttggcaccagctgtcattcatgctttggaaaagtttactgtatatacattagacattcctgttctttttggagttagtactacatcccctgaagaaacatgtgcccaggtgattcgtgaagctaagagaacagcaccaagtatagtgtatgttcctcatatccacgtgtggtgggaaatagttggaccgacacttaaagccacatttaccacattattacagaatattccttcatttgctccagttttactacttgcaacttctgacaaaccccattccgctttgccagaagaggtgcaagaattgtttatccgtgattatggagagatttttaatgtccagttaccggataaagaagaacggacaaaattttttgaagatttaattctaaaacaagctgctaagcctcctatatcaaaaaagaaagcagttttgcaggctttggaggtactcccagtagcaccaccacctgagccaagatcactgacagcagaagaagtgaaacgactagaagaacaagaagaagatacatttagagaactgaggattttcttaagaaatgttacacataggcttgctattgacaagcgattccgagtgtttactaagcctgttgaccctgatgaggttcctgattatgtcactgtaataaagcaaccaatggacctttcatctgtaatcagtaaaattgatctacacaagtatctgactgtgaaagactatttgagagatattgatctaatctgtagtaatgccttagaatacaatccagatagagatcctggagatcgtcttattaggcatagagcctgtgctttaagagatactgcctatgccataattaaagaagaacttgatgaagactttgagcagctctgtgaagaaattcaggaatctagaaagaaaagaggttgtagctcctccaaatatgccccgtcttactaccatgtgatgccaaagcaaaattccactcttgttggtgataaaagatcagacccagagcagaatgaaaagctaaagacaccgagtactcctgtggcttgcagcactcctgctcagttgaagaggaaaattcgcaaaaagtcaaactggtacttaggcaccataaaaaagcgaaggaagatttcacaggcaaaggatgatagccagaatgccatagatcacaaaattgagagtgatacagaggaaactcaagacacaagtgtagatcataatgagaccggaaacacaggagagtcttcggtggaagaaaatgaaaaacagcaaaatgcctctgaaagcaaactggaattgagaaataattcaaatacttgtaatatagagaatgagcttgaagactctaggaagactacagcatgtacagaattgagagacaagattgcttgtaatggagatgcttctagctctcagataatacatatttctgatgaaaatgaaggaaaagaaatgtgtgttctgcgaatgactcgagctagacgttcccaggtagaacagcagcagctcatcactgttgaaaaggctttggcaattctttctcagcctacaccctcacttgttgtggatcatgagcgattaaaaaatcttttgaagactgttgttaaaaaaagtcaaaactacaacatatttcagttggaaaatttgtatgcagtaatcagccaatgtatttatcggcatcgcaaggaccatgataaaacatcacttattcagaaaatggagcaagaggtagaaaacttcagttgttccagatgatgatgtcatggtatcgagtattctttatattcagttcctatttaagtcatttttgtcatgtccgcctaattgatgtagtatgaaaccctgcatctttaaggaaaagattaaaatagtaaaataaaagtatttaaactttcctgatatttatgtacatattaagataaatgtcatgtgtaagataactgataaatattggaactttgctagaacaagaccctgtagtaatagtaataatagttgaagtttggccaactcttaataaagttattttggtaactaatgttttatggcacttaagaataattagcagcgttaaattttgtttgtattaagcacttttaattttatccttcctaaaaatagtttattgtatctgacaagaaacttacttaaccattgtgtccttcccatcttttttgtcatctttgttttcttcaaatgccctcctcccatctgccttgagattccctcgtcttcacttaaaagccagagtgcaagtcatgatttgcgggagggctcttgaaccacttctggctgcaccacaattctgtacttgagtatcacagtcattgtttttgagacaaacatttttataattctaatttgggttaataaagattttaaatatttcttggtttacttttgtaattatatacacaacaaatgtattaataactaccttgttaaacaccttttaatagcacaaggtttttatatttgcaagctgttgatatctttctaaaactgtttaggttatagtctattgatactttttatatacaattttataaatataaatattataattttatattaatggtaccaaaaatacatttcttaaggttaaaagcatgcacttccatgcatacttgcttttggggagagtggggagaagacattctaataatcagtttgtgaaatagcttctgttggaaaccttttgaggggaataaggaatggtcatctaaaatgagagattctggattttaatgcagttcaaagttgagctgtatttttgttgttgatttatctggattttttttaaagccttctaaaacccagtgaattcaataccttaattagtacatactatcttatgtaatgcataaagcaatgccagtcactgagaacatttaaatatatttatattcctggagatacacattctcatttttgttggtttattataaattattcttctagatgcatcttttataactaggatttcattttgtgtgtatagcttatgtaataaattttaaaggtgaaaactctcttaaa

SEQ ID NO: 201 - DNA, 878 bp, Homo sapiens
gttggtccgcgcgttgctgcgttgtgaggggtgtcagctcagtgcatcccaggcagctcttagtgtggagcagtgaactgtgtgtggttccttctacttggggatcatgcagagagcttcacgtctgaagagagagctgcacatgttagccacagagccacccccaggcatcacatgttggcaagataaagaccaaatggatgacctgcgagctcaaatattaggtggagccaacacaccttatgagaaaggtgtttttaagctagaagttatcattcctgagaggtacccatttgaacctcctcagatccgatttctcactccaatttatcatccaaacattgattctgctggaaggatttgtctggatgttctcaaattgccaccaaaaggtgcttggagaccatccctcaacatcgcaactgtgttgacctctattcagctgctcatgtcagaacccaaccctgatgacccgctcatggctgacatatcctcagaatttaaatataataagccagccttcctcaagaatgccagacagtggacagagaagcatgcaagacagaaacaaaaggctgatgaggaagagatgcttgataatctaccagaggctggtgactccagagtacacaactcaacacagaaaaggaaggccagtcagctagtaggcatagaaaagaaatttcatcctgatgtttaggggacttgtcctggttcatcttagttaatgtgttctttgccaaggtgatctaagttgcctaccttgaatttttttttaaatatatttgatgacataatttttgtgtagtttatttatcttgtacatatgtattttgaaatcttttaaacctgaaaaataaatagtcatttaatgttga

SEQ ID NO: 202 - DNA, 1434 bp, Homo sapiens
agcggcggctcctgcagcggtggtcggctgttgggtgtggagtttcccagcgcccctcgggtccgaccctttgagcgttctgctccggcgccagcctacctcgctcctcggcgccatgaccacaaccaccaccttcaagggagtcgaccccaacagcaggaatagctcccgagttttgcggcctccaggtggtggatccaatttttcattaggttttgatgaaccaacagaacaacctgtgaggaagaacaaaatggcctctaatatctttgggacacctgaagaaaatcaagcttcttgggccaagtcagcaggtgccaagtctagtggtggcagggaagacttggagtcatctggactgcagagaaggaactcctctgaagcaagctccggagacttcttagatctgaagggagaaggtgatattcatgaaaatgtggacacagacttgccaggcagcctggggcagagtgaagagaagcccgtgcctgctgcgcctgtgcccagcccggtggccccggccccagtgccatccagaagaaatccccctggcggcaagtccagcctcgtcttgggttagctctgactgtcctgaacgctgtcgttctgtctgtttcctccatgcttgtgaactgcacaacttgagcctgactgtacatctcttggatttgtttcattaaaaagaagcactttatgtactgctgtcttttttttttttcttttgaagaacaggtttctctctgtccttgactcttgggtctgtgggccatggcatgagtgttttctagtagtagattggagggaaagctttgtgacacttagtactgtgtttttaagaagaaataatttggttccagatgtgttagaggatcttttgtactgaggtttttaacactttacttgggtttaccaagcctcaactggacagaccataaacagtccacaggcaccgttcctgccaggccccaacccacagggagtctctccgcagagccttcttggtgttgccctaacttgccagtggcctttgctcagagcctcctcctgtgacatgtgaacaatgaagaggcctgcgcctcctgccttgccgcctgcaaagcaaagaaactgccttttattttttaaccttaaaaagtagccagatagtaacaagactggctggctgatgagcaaagcctttgctctcacgcagaggaaggcttggatgtacaatgaaactgcctggaactaaaagcagtgaagcaagggaggcaatcacactgaagcgggtcttcctccaggaacggggtcccacaggcgtgttgttttaaataacctgatgctgtgtgcatgatgctggtgcttgaccatgaaaggaaagtctcatccttaaaatgtgttgtacttcacaatcctggactgttgcttcaagtaaacaatatccacattttgaaa

SEQ ID NO: 203 - DNA, 3614 bp, Homo sapiens
gcagactgcggcggcggtggtctgaggaagttctatcttggcgctaaagcggagacgcatcccccgacccgaggctacgatgagcacaccggccgtgccccaggacctgcagctgcccccgagtcagagggcgcagtccgcattcaaagagcaaagaagacaaaaactcaaggaacatctgttgagaagaaaaacgctttttgcatacaagcaggaaaatgagatgttatccagtagagatcagagagttgtgacatctgaggaccaagttcaagaagggactaaagtgctgaaacttaaaacaaaaatggctgataaagaaaacatgaagagacctgcagagagcaaaaataatacagtggtggggaaacattgtattcctttaaaaccttcaaatgaactaaccaattcaactgtagtaattgacacacataaacctaaggatagtaatcaaactccgcatttgttactaactgaagatgatccccaaagtcaacatatgacattaagccaggcatttcaccttaaaaacaatagtaaaaagaaacaaatgactacagaaaaacaaaagcaagatgctaacatgcccaagaaacctgtgcttggatcttatcgtggccagattgttcagtctaagattaattcatttagaaaacctctacaagtcaaagatgagagttctgcagcaacaaagaaactttcagccactatacctaaagccacaaaacctcagcctgtaaacaccagcagtgtaacagtgaaaagtaatagatcctccaatatgactgccactactaaatttgtgagcactacatctcagaacacacaacttgtgcgacctcctattagaagtcatcacagtaatacccgggacactgtgaaacaaggcatcagtagaacttctgccaatgttacaatccggaaagggcctcatgaaaaagaactattacaatcaaaaacagctttatctagtgtcaaaaccagttcttctcaaggtataataagaaataagactctatcaagatccatagcatctgaagttatagccaggcctgcttcattgtctaatgataaactgatggaaaagtcagagcccgttgaccagcgaagacatactgcaggaaaagcaattgttgatagtagatcagctcagcccaaagaaacctcggaagagagaaaagctcgtctgagtgagtggaaagctggcaaaggaagagtgctaaaaaggccccctaattcagtagttactcagcatgagcctgcaggacaaaatgaaaaaccagttgggtctttttggactaccatggcagaagaagatgaacaaagattatttactgaaaaagtaaacaacacattttctgaatgcctgaacttgattaatgagggatgtccaaaagaagatatactggtcacactgaatgacctgattaaaaatattccagatgccaaaaagcttgttaagtattggatatgtcttgcacttattgaaccaatcacaagtcctattgaaaatattattgcaatctatgagaaagccattctggcaggggctcagcctattgaagagatgcgacacacgattgtagatattctaacaatgaagagtcaagaaaaagctaatttaggagaaaatatggagaagtcttgtgcaagcaaggaagaagtcaaagaagtcagtattgaagatacaggtgttgatgtagatccagaaaaactggaaatggagagtaaacttcatagaaatttgctatttcaagattgtgaaaaagagcaagacaacaaaacaaaagatccaacccatgatgttaaaacccccaatacagaaacgaggacaagttgcttaattaaatataatgtgtctactacgccatacttgcaaagtgtgaaaaaaaaggtgcagtttgatggaacaaattccgcatttaaagagctgaagtttttaacaccagtgagacgttctcgacgtcttcaagagaaaacttctaaattgccagatatgttaaaagatcattatccttgtgtgtcttcattggaacagctaacggagttgggaagagaaactgatgcttttgtatgccgccctaatgcagcactgtgccgggtgtactatgaggctgatacaacataagagaaataaagctctgttagggaatggggtttttattatttgtggggtgttttgttttgagtagctttatattgctcttaggtctggagttggccatgtacctatgtatcctaagcattcacggcagtgagctcctttactaacattcatgttatggcaagagttgtcctctacattggaaagctaatcctaccttgtcagtttcaaccaactgagttttttctttaagaaaggtaaattttgtcagctagtttactatgttccttgaatataaacaggttataatactaccctgttcactttactaaatataagtacagtaatgatgcataattagaaaatgaggtattctaggtaaaatgtatgtttgccttgacatgtttttaaaagttatgatgtacctccctgcctttaaacagaatacttttttcttttttttggcctttctcagattagtcaaaaattctatagaatgactcacttcgaatactaagacacaggaggtttagcctgctttcttaccaaattcatgttacccagacttgtgttctcttgcgtcccttggactgcctgttgattgatggaaagtgtctgcactgacacttttcgtcagtagtctgtagtttcgtggcctcttttgattataactggggtcaccaagaaggtttacttaattaaataccgcatttctaagagaagatactttgtgtaagaaaagatgccacatttagtggtttaacttttgtaacttcacttgatagtttttaagcaattagaatggagttagggaaagaacatatcatactgaacaaatgtcattctagtttagatagcatttctaagataactgatactaatacttgttttcttccctataacataaaaaacttcactgttaagtcatgtcccttgaaacatgatagttacatacacagttttctctccacacataaataacaccactaaagttgttttgtaaggttccaaactaatatggcatatatcaactctacagtttcaaataaatgactttttaattgtaaaagattagttgaaaaactgtatgaatgtgaagatcacatgcttagtcatttttatgttcattccactttgtatatcttttctatttattgacttctcatgttctagagagtaggacttttattccgtgtacctgatatatatacaattaaaatatctgtgtaattatgttttaatgaagtttatttcaacagatattttatgaaatgcagtttaaccacagtgaatgaattttagctttgcttttgaaatacattgtaagatttgacttgaggtttttgacacttaagtacatgcttaatgatatattttcaaaagtcatcagtctacttacataaactttacctaatttttttcactttaacaaaaacataactatgcccttgttttttcatactttgacccaaaatatgccattttgaaataaaatttaagctttgataca

SEQ ID NO: 204 - DNA, 4731 bp, Homo sapiens
gagtccgtcactggaagccgagaggagaggacagctggttgtgggagagttcccccgcctcagactcctggttttttccaggagacacactgagctgagactcacttttctcttcctgaatttgaaccaccgtttccatcgtctcgtagtccgacgcctggggcgatggatccgtttacggagaaactgctggagcgaacccgtgccaggcgagagaatcttcagagaaaaatggctgagaggcccacagcagctccaaggtctatgactcatgctaagcgagctagacagccactttcagaagcaagtaaccagcagcccctctctggtggtgaagagaaatcttgtacaaaaccatcgccatcaaaaaaacgctgttctgacaacactgaagtagaagtttctaacttggaaaataaacaaccagttgagtcgacatctgcaaaatcttgttctccaagtcctgtgtctcctcaggtgcagccacaagcagcagataccatcagtgattctgttgctgtcccggcatcactgctgggcatgaggagagggctgaactcaagattggaagcaactgcagcctcctcagttaaaacacgtatgcaaaaacttgcagagcaacggcgccgttgggataatgatgatatgacagatgacattcctgaaagctcactcttctcaccaatgccatcagaggaaaaggctgcttcccctcccagacctctgctttcaaatgcctcggcaactccagttggcagaaggggccgtctggccaatcttgctgcaactatttgctcctgggaagatgatgtaaatcactcatttgcaaaacaaaacagtgtacaagaacagcctggtaccgcttgtttatccaaattttcctctgcaagtggagcatctgctaggatcaatagcagcagtgttaagcaggaagctacattctgttcccaaagggatggcgatgcctctttgaataaagccctatcctcaagtgctgatgatgcgtctttggttaatgcctcaatttccagctctgtgaaagctacttctccagtgaaatctactacatctatcactgatgctaaaagttgtgagggacaaaatcctgagctacttccaaaaactcctattagtcctctgaaaacgggggtatcgaaaccaattgtgaagtcaactttatcccagacagttccatccaagggagaattaagtagagaaatttgtctgcaatctcaatctaaagacaaatctacgacaccaggaggaacaggaattaagcctttcctggaacgctttggagagcgttgtcaagaacatagcaaagaaagtccagctcgtagcacaccccacagaacccccattattactccaaatacaaaggccatccaagaaagattattcaagcaagacacatcttcatctactacccatttagcacaacagctcaagcaggaacgtcaaaaagaactagcatgtcttcgtggccgatttgacaagggcaatatatggagtgcagaaaaaggcggaaactcaaaaagcaaacaactagaaaccaaacaggaaactcactgtcagagcactcccctcaaaaaacaccaaggtgtttcaaaaactcagtcacttccagtaacagaaaaggtgaccgaaaaccagataccagccaaaaattctagtacagaacctaaaggtttcactgaatgcgaaatgacgaaatctagccctttgaaaataacattgtttttagaagaggacaaatccttaaaagtaacatcagacccaaaggttgagcagaaaattgaagtgatacgtgaaattgagatgagtgtggatgatgatgatatcaatagttcgaaagtaattaatgacctcttcagtgatgtcctagaggaaggtgaactagatatggagaagagccaagaggagatggatcaagcattagcagaaagcagcgaagaacaggaagatgcactgaatatctcctcaatgtctttacttgcaccattggcacaaacagttggtgtggtaagtccagagagtttagtgtccacacctagactggaattgaaagacaccagcagaagtgatgaaagtccaaaaccaggaaaattccaaagaactcgtgtccctcgagctgaatctggtgatagccttggttctgaagatcgtgatcttctttacagcattgatgcatatagatctcaaagattcaaagaaacagaacgtccatcaataaagcaggtgattgttcggaaggaagatgttacttcaaaactggatgaaaaaaataatgcctttccttgtcaagttaatatcaaacagaaaatgcaggaactcaataacgaaataaatatgcaacagacagtgatctatcaagctagccaggctcttaactgctgtgttgatgaagaacatggaaaagggtccctagaagaagctgaagcagaaagacttcttctaattgcaactgggaagagaacacttttgattgatgaattgaataaattgaagaacgaaggacctcagaggaagaataaggctagtccccaaagtgaatttatgccatccaaaggatcagttactttgtcagaaatccgcttgcctctaaaagcagattttgtctgcagtacggttcagaaaccagatgcagcaaattactattacttaattatactaaaagcaggagctgaaaatatggtagccacaccattagcaagtacttcaaactctcttaacggtgatgctctgacattcactactacatttactctgcaagatgtatccaatgactttgaaataaatattgaagtttacagcttggtgcaaaagaaagatccctcaggccttgataagaagaaaaaaacatccaagtccaaggctattactccaaagcgactcctcacatctataaccacaaaaagcaacattcattcttcagtcatggccagtccaggaggtcttagtgctgtgcgaaccagcaacttcgcccttgttggatcttacacattatcattgtcttcagtaggaaatactaagtttgttctggacaaggtcccctttttatcttctttggaaggtcatatttatttaaaaataaaatgtcaagtgaattccagtgttgaagaaagaggttttctaaccatatttgaagatgttagtggttttggtgcctggcatcgaagatggtgtgttctttctggaaactgtatatcttattggacttatccagatgatgagaaacgcaagaatcccataggaaggataaatctggctaattgtaccagtcgtcagatagaaccagccaacagagaattttgtgcaagacgcaacacttttgaattaattactgtccgaccacaaagagaagatgaccgagagactcttgtcagccaatgcagggacacactctgtgttaccaagaactggctgtctgcagatactaaagaagagcgggatctctggatgcaaaaactcaatcaagttcttgttgatattcgcctctggcaacctgatgcttgctacaaacctattggaaagccttaaaccgggaaatttccatgctatctagaggtttttgatgtcatcttaagaaacacacttaagagcatcagatttactgattgcattttatgctttaagtacgaaagggtttgtgccaatattcactacgtattatgcagtatttatatcttttgtatgtaaaactttaactgatttctgtcattcatcaatgagtagaagtaaatacattatagttgattttgctaaatcttaatttaaaagcctcattttcctagaaatctaattattcagttattcatgacaatatttttttaaaagtaagaaattctgagttgtcttcttggagctgtaggtcttgaagcagcaacgtctttcaggggttggagacagaaacccattctccaatctcagtagttttttcgaaaggctgtgatcatttattgatcgtgatatgacttgttactagggtactgaaaaaaatgtctaaggcctttacagaaacatttttagtaatgaggatgagaactttttcaaatagcaaatatatattggcttaaagcatgaggctgtcttcagaaaagtgatgtggacataggaggcaatgtgtgagacttgggggttcaatattttatatagaagagttaataagcacatggtttacatttactcagctactatatatgcagtgtggtgcacattttcacagaattctggcttcattaagatcattatttttgctgcgtagcttacagacttagcatattagttttttctactcctacaagtgtaaattgaaaaatctttatattaaaaaagtaaactgttatgaagctgctatgtactaataatactttgcttgccaaagtgtttgggttttgttgttgtttgtttgtttgtttgtttttggttcatgaacaacagtgtctagaaacccattttgaaagtggaaaattattaagtcacctatcacctttaaacgcctttttttaaaattataaaatattgtaaagcagggtctcaacttttaaatacactttgaacttcttctctgaattattaaagttctttatgacctcatttataaacactaaattctgtcacctcctgtcattttattttttattcattcaaatgtattttttcttgtgcatattataaaaatatattttatgagctcttactcaaataaatacctgtaaatgtctaaaggaa

SEQ ID NO: 205 - DNA, 3551 bp, Homo sapiens
tttcaaacagcggaacaaactgaaagctccggtgccagaccccacccccggccccggcccgggaccccctcccctcccgggatcccccggggttcccaccccgcccgcaccgccggggacccggccggtccggcgcgagcccccgtccggggccctggctcggcccccaggttggaggagcccggagcccgccttcggagctacggcctaacggcggcggcgactgcagtctggagggtccacacttgtgattctcaatggagagtgaaaacgcagattcataatgaaaactagcccccgtcggccactgattctcaaaagacggaggctgccccttcctgttcaaaatgccccaagtgaaacatcagaggaggaacctaagagatcccctgcccaacaggagtctaatcaagcagaggcctccaaggaagtggcagagtccaactcttgcaagtttccagctgggatcaagattattaaccaccccaccatgcccaacacgcaagtagtggccatccccaacaatgctaatattcacagcatcatcacagcactgactgccaagggaaaagagagtggcagtagtgggcccaacaaattcatcctcatcagctgtgggggagccccaactcagcctccaggactccggcctcaaacccaaaccagctatgatgccaaaaggacagaagtgaccctggagaccttgggaccaaaacctgcagctagggatgtgaatcttcctagaccacctggagccctttgcgagcagaaacgggagacctgtgcagatggtgaggcagcaggctgcactatcaacaatagcctatccaacatccagtggcttcgaaagatgagttctgatggactgggctcccgcagcatcaagcaagagatggaggaaaaggagaattgtcacctggagcagcgacaggttaaggttgaggagccttcgagaccatcagcgtcctggcagaactctgtgtctgagcggccaccctactcttacatggccatgatacaattcgccatcaacagcactgagaggaagcgcatgactttgaaagacatctatacgtggattgaggaccactttccctactttaagcacattgccaagccaggctggaagaactccatccgccacaacctttccctgcacgacatgtttgtccgggagacgtctgccaatggcaaggtctccttctggaccattcaccccagtgccaaccgctacttgacattggaccaggtgtttaagccactggacccagggtctccacaattgcccgagcacttggaatcacagcagaaacgaccgaatccagagctccgccggaacatgaccatcaaaaccgaactccccctgggcgcacggcggaagatgaagccactgctaccacgggtcagctcatacctggtacctatccagttcccggtgaaccagtcactggtgttgcagccctcggtgaaggtgccattgcccctggcggcttccctcatgagctcagagcttgcccgccatagcaagcgagtccgcattgcccccaaggtgctgctagctgaggaggggatagctcctctttcttctgcaggaccagggaaagaggagaaactcctgtttggagaagggttttctcctttgcttccagttcagactatcaaggaggaagaaatccagcctggggaggaaatgccacacttagcgagacccatcaaagtggagagccctcccttggaagagtggccctccccggccccatctttcaaagaggaatcatctcactcctgggaggattcgtcccaatctcccaccccaagacccaagaagtcctacagtgggcttaggtccccaacccggtgtgtctcggaaatgcttgtgattcaacacagggagaggagggagaggagccggtctcggaggaaacagcatctactgcctccctgtgtggatgagccggagctgctcttctcagaggggcccagtacttcccgctgggccgcagagctcccgttcccagcagactcctctgaccctgcctcccagctcagctactcccaggaagtgggaggaccttttaagacacccattaaggaaacgctgcccatctcctccaccccgagcaaatctgtcctccccagaacccctgaatcctggaggctcacgcccccagccaaagtagggggactggatttcagcccagtacaaacctcccagggtgcctctgaccccttgcctgaccccctggggctgatggatctcagcaccactcccttgcaaagtgctcccccccttgaatcaccgcaaaggctcctcagttcagaacccttagacctcatctccgtcccctttggcaactcttctccctcagatatagacgtccccaagccaggctccccggagccacaggtttctggccttgcagccaatcgttctctgacagaaggcctggtcctggacacaatgaatgacagcctcagcaagatcctgctggacatcagctttcctggcctggacgaggacccactgggccctgacaacatcaactggtcccagtttattcctgagctacagtagagccctgcccttgcccctgtgctcaagctgtccaccatcccgggcactccaaggctcagtgcaccccaagcctctgagtgaggacagcaggcagggactgttctgctcctcatagctccctgctgcctgattatgcaaaagtagcagtcacaccctagccactgctgggaccttgtgttccccaagagtatctgattcctctgctgtccctgccaggagctgaagggtgggaacaacaaaggcaatggtgaaaagagattaggaaccccccagcctgtttccattctctgcccagcagtctcttaccttccctgatctttgcagggtggtccgtgtaaatagtataaattctccaaattatcctctaattataaatgtaagcttatttccttagatcattatccagagactgccagaaggtgggtaggatgacctggggtttcaattgacttctgttccttgcttttagttttgatagaagggaagacctgcagtgcacggtttcttccaggctgaggtacctggatcttgggttcttcactgcagggacccagacaagtggatctgcttgccagagtcctttttgcccctccctgccacctccccgtgtttccaagtcagctttcctgcaagaagaaatcctggttaaaaaagtcttttgtattgggtcaggagttgaatttggggtgggaggatggatgcaactgaagcagagtgtgggtgcccagatgtgcgctattagatgtttctctgataatgtccccaatcataccagggagactggcattgacgagaactcaggtggaggcttgagaaggccgaaagggcccctgacctgcctggcttccttagcttgcccctcagctttgcaaagagccaccctaggccccagctgaccgcatgggtgtgagccagcttgagaacactaactactcaataaaagcgaaggtggacatgaaaaaaaaaaaaaaaaaaa

SEQ ID NO: 206 - DNA, 1808 bp, Homo sapiens
gcacgtagagcagctaggtgggcttcggggttgcagctgctgcggctccgcagctgctccggctccgggacccttagagtccattcgcgtgccttctattgaagagcaggaactgacggttgttttaggcctctcaattccagaaagtttcctggggacctgtccggtcggaaagtcgagggacagttgtcttggtatttgtaaagggggtatccagtgaggcggagcttgagggggttgtgtcgagtgactgatacagctgtcaaccaataaagctactatcgctcgcctcaggaaaaccatcacaactccagctggatgtgcgcataatagtgtaatcactcatgattctattttgtttaataattcgttcttgagactagacgtctcgaaagcgaagactggcactcctcagcctgccacggacggctcgcaggccgatactgaacagaagtacccttatcaaggaggcgtcacccctgggcaagcctagcatcagtccattgacacctacagtcaccatgatagacgttctcccagaccaacagcttcctttggctcgaggcgggtcttacgtggagggcctatgggaactacgtcggctcagccaatagggtcagggcagggggcgtggcgggaagtttgaaactggtaacttcgggagttgagccacgagctgttgtgcatccagaggtggaattggggcccggcattccctcctcgtcccgggctggcccttgcccccaccctgcaactcctggttgagatgggctcagccaagagcgtcccagtcacaccagcgcggcctccgccgcacaacaagcatctggctcgagtggcggacccccgttcacctagtgctggcatcctgcgcactcccatccaggtggagagctctccacagccaggcctaccagcaggggagcaactggagggtcttaaacatgcccaggactcagatccccgctctcctactcttggtattgcacggacacctatgaagaccagcagtggagaccccccaagcccactggtgaaacagctgagtgaagtatttgaaactgaagactctaaatcaaatcttcccccagagcctgttctgcccccagaggcacctttatcttctgaattggacttgcctctgggtacccagttatctgttgaggaacagatgccaccttggaaccagactgagttcccctccaaacaggtgttttccaaggaggaagcaagacagcccacagaaacccctgtggccagccagagctccgacaagccctcaagggaccctgagactcccagatcttcaggttctatgcgcaatagatggaaaccaaacagcagcaaggtactagggagatcccccctcaccatcctgcaggatgacaactcccctggcaccctgacactacgacagggtaagcggccttcacccctaagtgaaaatgttagtgaactaaaggaaggagccattcttggaactggacgacttctgaaaactggaggacgagcatgggagcaaggccaggaccatgacaaggaaaatcagcactttcccttggtggagagctaggccctgcatggccccagcaatgcagtcacccagggcctggtgatatctgtgtcctctcaccccttctttcccagggatactgaggaatggcttgttttcttagactcctcctcagctaccaaactgggactcacagctttattgggctttctttgtgtcttgtgtgtttcttttatattaaaggaagtaattttaaatgttactttaaaaaggtatatgtaaaccttgcaccgag

SEQ ID NO: 207 - DNA, 4062 bp, Homo sapiens
gcggtttgggagcgctactcgccaggtggactcggagtccgcgagcgtcgtcggcaagcggccgcctttccacggtactccgagcactatgtcgtccccggcgtcgaccccgagccgccgcggcagccggcgtggaagggccacccccgcccagacgcctcggagtgaggatgccaggtcatctccctctcagagacgtagaggcgaggattccacctccacgggggagttgcagccgatgccaacctcgcctggagtggacctgcagagccctgctgcgcaggacgtgctgttttccagccctccccaaatgcattcttcagctatccctcttgactttgatgttagttcaccactgacatacggcactcccagctctcgggtagagggaaccccaagaagtggtgttaggggcacacctgtgagacagaggcctgacctgggctctgcacagaagggcctgcaagtggatctgcagtctgacggggcagcagcagaagatatagtggcaagtgagcagtctctaggccaaaaacttgtgatctggggaacagatgtaaatgtggcagcatgcaaagaaaactttcagagatttcttcagcgttttattgaccctctggctaaagaagaagaaaatgttggcatagatattactgaacctctatacatgcaacgacttggggagattaatgttattggtgagccatttttaaatgtgaactgtgaacacatcaaatcatttgacaaaaatttgtacagacaactcatctcttacccacaggaagttattccaacttttgacatggctgtcaatgaaatcttctttgaccgttaccctgactcaatcttagaacatcagattcaagtaagaccattcaacgcattgaagactaagaatatgagaaacctgaatccagaagacattgaccagctcatcaccatcagcggcatggtgatcaggacatcccagctgattcccgagatgcaggaggccttcttccagtgccaagtgtgtgcccacacgacccgggtggagatggaccgcggccgcattgcagagcccagtgtgtgcgggcgctgccacaccacccacagcatggcactcatccacaaccgctccctcttctctgacaagcagatgatcaagcttcaggagtctccggaagacatgcctgcagggcagacaccacacacagttatcctgtttgctcacaatgatctcgttgacaaggtccagcctggggacagagtgaatgttacaggcatctatcgagctgtgcctattcgagtcaatccaagagtgagtaatgtgaagtctgtctacaaaacccacattgatgtcattcattatcggaaaacggatgcaaaacgtctgcatggccttgatgaagaagcagaacagaaacttttttcagagaaacgtgtggaattgcttaaggaactttccaggaaaccagacatttatgagaggcttgcttcagccttggctccaagcatttatgaacatgaagatataaagaagggaattttgcttcagctctttggcgggacaaggaaggattttagtcacactggaaggggcaaatttcgggctgagatcaacatcttgctgtgtggcgaccctggtaccagcaagtcccagctgctgcagtacgtgtacaacctcgtccccaggggccagtacacgtctgggaagggctccagtgcagttggcctcactgcgtacgtaatgaaagaccctgagacaaggcagctggtcctgcagacaggtgctcttgtcctgagtgacaacggcatctgctgtatcgatgagttcgacaagatgaatgaaagtacaagatcggtattgcatgaagtcatggaacagcagactctgtccattgcaaaggctgggatcatctgtcagctcaatgcgcgcacctctgtcctggcagcagcaaatcccattgagtctcagtggaatcctaaaaaaacaaccattgaaaacatccagctgcctcatactttattatcaaggtttgatttgatcttcctcttgctggaccctcaggacgaagcctatgacaggcgtctggctcaccacctggtcgcactgtactaccagagcgaggagcaggcagaggaggagctcctggacatggcggtgctaaaggactacattgcctacgcgcacagcaccatcatgccgcggctaagtgaggaagccagccaggctctcatcgaggcttatgtagacatgaggaagattggcagtagccggggaatggtttctgcataccctcgacagctagagtcattaatccgcttagcagaagcccatgctaaagtaagattgtctaacaaagttgaagccattgatgtggaagaggccaaacgcctccatcgggaagctctgaagcagtctgcaactgatccccggactggcatcgtggacatatctattcttactacggggatgagtgccacctctcgtaaacggaaagaagaattagctgaagcattgaaaaagcttattttatctaagggcaaaacaccagctctaaaataccagcaactttttgaagatattcggggacaatctgacatagcaattactaaagatatgtttgaagaagcactgcgtgccctggcagatgatgatttcctgacagtgactgggaagaccgtgcgcttgctctgaagccttgtgagcaaggaaggctccctgcatgtcctgcttgctgcacgccacatgggtgtggtctgcatctcagttggccgccatcagtgtaaatagagcttaaagtcatggtttggctgcataaaaattttctaacttgggttcaatatttgtagtgaagtatctgttttcatttttttcacgttataaataaaaatactatgctggccgggcgcggtggctcacacctgtaatcccagcactttgggaggccaatgtgggtggatcatgaggtcaggagttcaagaccagcctagccaagatggtgaaaccccgtctctagtaaagataacaaaaaattagctgggcttgatggcatgcgcctgtaatcccagctactcgggaggttgaggcaggagaatcgcttaaacccaggcggcagaggttgcagtgagccaagatcgcgccactgcactccagcctcagcaatagagtgagactgtctcaaaaaaaaaaaaaaaaaaaaaacctgccaattttcaaacataccgtagagattattttcaggtgccattttatagtatagcagcagggcttttactctgtgtatgcacagatgcagtctggggcatggtttgtgtgctggactttctcatggccatcatcagtatgcttatggatttgatgacaggcatagcctgggcatatcacctcattggtaaagggctagagcctttcttttttatggcacttctttttttgagatagggtcttactctgtcaccctggctagagtacactggtacaatcacggctcaatgtaggcttaacctcctgggctcaggtgtatgtcactatgcccggctactttttgtattttttggtagagacggcttcgccacgttgcccaggctgcaagcgatatgcctaggctcaagcgatctgcccacctcaacttccggaagtgctgagattacaggtgtgagccactgcacccagcctttgttttattttttattttttgagaggtatgattctttctagagattttttctcatggctactattagatcaggaatgggtgattggagattattagattctaggttaacttctaccactttaccctaatacataaaactttttcctaaataaatgatggaaggaataatacttggttacctggcattatttttcagtaagaaaaaagctttactaaccactacatttatggaaatttgtaggggtaagtattttataggtcataaaaaacaccataatataacgaatctcattttctttaaatgtgaattaaatcctaacagtcatctttataaaatgaccataggctaaaatcttacgtgtaagtactactacaataaataatttctgaaacctttaaa

SEQ ID NO: 208 - DNA, 80 bp, Artificial sequence
  chemically synthesized
tgactatgccctgccccaacttctacattctggatgaacccacaaaccacctggacatggagaccattgaggctctgggc

SEQ ID NO: 209 - DNA, 80 bp, Artificial sequence
  chemically synthesized
accactggctgcctcacctactccccacaccagatcggcatcaagcagatcctgccacaccagatgaccacggcagggcc

SEQ ID NO: 210 - DNA, 80 bp, Artificial sequence
  chemically synthesized
atctgatcgaggagactggccacttcaatgtcaccaacaccaccttcgacttcgacctcttctccctggacgagaccacc

SEQ ID NO: 211 - DNA, 80 bp, Artificial sequence
  chemically synthesized
tggcaccgacagacagatcctgtttctggaccttggcactggagccgtcctgtgtagcctagccctcccgagcctccctg

SEQ ID NO: 212 - DNA, 80 bp, Artificial sequence
  chemically synthesized
cactccagcctctttctggaggagctggagatgctggtgccctcaacacccacctctactagcggtgccttctggaaggg

SEQ ID NO: 213 - DNA, 80 bp, Artificial sequence
  chemically synthesized
agcctggcctggctggacgagcacacgctggtcacgacctcccatgatgcctctgtcaaggagtggacaatcacctactg

SEQ ID NO: 214 - DNA, 80 bp, Artificial sequence
  chemically synthesized
actattcctactcggtggtgaggggctgcgaccgcatcgtgcccgtggacatctacatcccaggctgcccacctacggcc

SEQ ID NO: 215 - DNA, 80 bp, Artificial sequence
  chemically synthesized
agcattccaacgccaagaacgccatcctcttcgagaccatcagcctcatcatccactatgacagtgagcccaacctcctg

SEQ ID NO: 216 - DNA, 80 bp, Artificial sequence
  chemically synthesized
ctttgagtctatcaaaaggaaacttcctttcctcaactgggatgcctttcctaagctgaaaggactgaggagcgcaactc

SEQ ID NO: 217 - DNA, 80 bp, Artificial sequence
  chemically synthesized
tggaagagagctatgacctcaaggacacgttgagaaccatgggaatggtggatatcttcaatggggatgcagacctctca

SEQ ID NO: 218 - DNA, 80 bp, Artificial sequence
  chemically synthesized
cctcagcagtgccagcagaaatatcctcctgtgacaccttccccaccctgccagtcaaagtatccacccaagagcaagta

SEQ ID NO: 219 - DNA, 80 bp, Artificial sequence
  chemically synthesized
gttttcagctgctcagaattcatctgaagagagacttaagatgaaagcaaatgattcagctcccttatacccccattaaa

SEQ ID NO: 220 - DNA, 80 bp, Artificial sequence
  chemically synthesized
ccgtgtctcaagatacgtcctgtggatccgtgaaacaatccgaaaatatgaaacccagcagcaaaaatggttgaagggcc

SEQ ID NO: 221 - DNA, 80 bp, Artificial sequence
  chemically synthesized
tccgaagaagagtggaccaactgaagagtgatcaatctcggttggattcggaactgaagaacatgcaggacatggtggag

SEQ ID NO: 222 - DNA, 80 bp, Artificial sequence
  chemically synthesized
gcagcccttcgaggtgctcatcatcgcgtcagacgacggcttcaaggccgtggttggggacgcccagtaccaccacttcc

SEQ ID NO: 223 - DNA, 80 bp, Artificial sequence
  chemically synthesized
gttcctgttaaaggtcaagacactgtcaaaggccgtgttccattcaatggacaagatcccgttaaaggacaagtttcagt

SEQ ID NO: 224 - DNA, 80 bp, Artificial sequence
  chemically synthesized
cccaagctgttctacgccgaccaccccttcatcttcctagtgcgggacacccaaagcggctccctgctattcattgggcg

SEQ ID NO: 225 - DNA, 80 bp, Artificial sequence
  chemically synthesized
gctccttcctggtcaagaagcatttcaacgcctccaaaaagccaaactacagcgaactggacacacatacagtgattatt

SEQ ID NO: 226 - DNA, 80 bp, Artificial sequence
  chemically synthesized
cacggctcttcatggaccttcagtgcactcagctgcaagattgtggcctttatggccgtgctcttttgcttccatgcggc

SEQ ID NO: 227 - DNA, 80 bp, Artificial sequence
  chemically synthesized
cagacagttctaattgttggaacgttgctctatgcatgctattgggtcatgcttttgacgctgtatgtagttctcatcaa

SEQ ID NO: 228 - DNA, 80 bp, Artificial sequence
  chemically synthesized
ttttgtcgcaatcatatactgtttctgcaatggcgaggtacaagctgagatcaagaaatcttggagccgctggacactgg

SEQ ID NO: 229 - DNA, 80 bp, Artificial sequence
  chemically synthesized
tgatgtggaagcttttcaacaggaactggctctgcttaagatagaggatgcacctggagatggtcctgatgtcagggagg

SEQ ID NO: 230 - DNA, 80 bp, Artificial sequence
  chemically synthesized
tgcatttgatggcctgtattttctccgcactgagaatggtgttatctaccagaccttctgtgacatgacctctgggggtg

SEQ ID NO: 231 - DNA, 80 bp, Artificial sequence
  chemically synthesized
agatgccactccccagaatcccttcttgaagtccagacctcaggttaggccaaaaccagctccttcccccaaaacggagc

SEQ ID NO: 232 - DNA, 80 bp, Artificial sequence
  chemically synthesized
acccagtggtctgttgactcccttacacttggagggccttgtccagttccaagatgtctcctttgcctacccaaaccgcc

SEQ ID NO: 233 - DNA, 80 bp, Artificial sequence
  chemically synthesized
aagacataccacgtaggagaacagtggcagaaggaatatctcggtgccatttgctcctgcacatgctttggaggccagcg

SEQ ID NO: 234 - DNA, 80 bp, Artificial sequence
  chemically synthesized
gaaagctttgaggagtcctggacacccaactacaagcagtgttcatggagttcattgaattatggcatagatcttgggaa

SEQ ID NO: 235 - DNA, 80 bp, Artificial sequence
  chemically synthesized
gtgagttcccggagtgagttgaaccaggtggaccaagtgggctacgtgacctatgacatcctgcagtgccctgaggacta

SEQ ID NO: 236 - DNA, 80 bp, Artificial sequence
  chemically synthesized
ctatatgaaggatgtgaaggtcagcctcttcaagaaggacaaggctatgctcttcacctatgatcagtaccaggaaaata

SEQ ID NO: 237 - DNA, 80 bp, Artificial sequence
  chemically synthesized
gctgtcattggtgctgtcctggctgtgtttggaggtattctaatgccagttggagacctgcttatccagaagacaattaa

SEQ ID NO: 238 - DNA, 80 bp, Artificial sequence
  chemically synthesized
ggaaacggtccaggagctgatccccctggccaaggagatgatggcccagaagcgcaaggggaagatggtgaagctgtacg

SEQ ID NO: 239 - DNA, 80 bp, Artificial sequence
  chemically synthesized
gaagacattggaggcaaaaagctgactgagatcatcaacacgcagcatgagaatgtcaaatacctgccagggcacaagtt

SEQ ID NO: 240 - DNA, 80 bp, Artificial sequence
  chemically synthesized
acactggcagtctaccaacagatcctcaccagtatgccttccagaaacgtgatccaaatatccaacgacctggagaacct

SEQ ID NO: 241 - DNA, 80 bp, Artificial sequence
  chemically synthesized
ccactgggcacggattccctcaagaacctgaccctgagggacttgagcctgaggggaaactccgagacgtcgtcggacac

SEQ ID NO: 242 - DNA, 80 bp, Artificial sequence
  chemically synthesized
ctgggtggtgtggcacataccctgcagaagaccctccagaccaccatctcggctgtgacatgggcacctgcagctgtgct

SEQ ID NO: 243 - DNA, 80 bp, Artificial sequence
  chemically synthesized
cctgcctagcagtgagcagatgccaaatgaccaggaagaggagtcctttgcagagggtcattccgaagcgtccctcgcca

SEQ ID NO: 244 - DNA, 80 bp, Artificial sequence
  chemically synthesized
atttagtgtctccagactctcctagatccatagacagcaacagtgagattgtctcatttggaagtccatgctccattaat

SEQ ID NO: 245 - DNA, 80 bp, Artificial sequence
  chemically synthesized
ggataagaagcgattcagctttgtcttcaagcctgtcttcaacacctcactgctctttctacagtgtgagctgacgctgt

SEQ ID NO: 246 - DNA, 80 bp, Artificial sequence
  chemically synthesized
aagggtggtccaactgccaaagtcaagcaaggccacatcagcttcaaggttatttccagcgatgatctcactgagctcta

SEQ ID NO: 247 - DNA, 80 bp, Artificial sequence
  chemically synthesized
caagaaggcaaaaaggtcatccaaggaggaagccgagatggcctacaaagacttcctgctccagtccagcaccgtggccg

SEQ ID NO: 248 - DNA, 80 bp, Artificial sequence
  chemically synthesized
ggtagcagcagcaatttccacatcaatgtagaagagtcagtggatggacaggtggtttcttcccacaagagagaaatcta

SEQ ID NO: 249 - DNA, 80 bp, Artificial sequence
  chemically synthesized
tgcagactcagtggagaaggagttggaccagtcaacatctctgttgtcacaagcagtgtttcctctggatatggcagtgg

SEQ ID NO: 250 - DNA, 80 bp, Artificial sequence
  chemically synthesized
gagatcaaagactacagtccctacttcaagaccattgaggacctgaggaacaagattctcacagccacagtggacaatgc

SEQ ID NO: 251 - DNA, 80 bp, Artificial sequence
  chemically synthesized
caaagccttggtcaaaaagtatcaggaaggcctcatcacacttacagaacttgctgattctttgctgagccggttagtcc

SEQ ID NO: 252 - DNA, 80 bp, Artificial sequence
  chemically synthesized
cccacctggattctatggagtgaactgtgacaaagcaaactgctcaaccacctgctttaatggagggacctgtttctacc

SEQ ID NO: 253 - DNA, 80 bp, Artificial sequence
  chemically synthesized
aaggagcaggccatgtttgataagaaggtgcagctccagagaatggtagaccaaaggtcggtgatttcagatgaaaagaa

SEQ ID NO: 254 - DNA, 80 bp, Artificial sequence
  chemically synthesized
tagattctagtgcattcaagcacaatggcacggttgaatgtaaggcttacaacgatgtgggcaagacttctgcctatttt

SEQ ID NO: 255 - DNA, 80 bp, Artificial sequence
  chemically synthesized
ctacagtgacttgacaatgaaaaccagcgacaagttcaagtttgtcttccgagaaaagatgggcaggattgttgattatt

SEQ ID NO: 256 - DNA, 80 bp, Artificial sequence
  chemically synthesized
atggcgacaagaagattgtccccaagaagaagaagcccctgaagttggggcccatcaagaagaaggacctgaagaagctt

SEQ ID NO: 257 - DNA, 80 bp, Artificial sequence
  chemically synthesized
gaatttgtacgagacctgcttctatctcctgaagaaaactgtggcattctggaatgggaagatagggaacaaggaatttt

SEQ ID NO: 258 - DNA, 80 bp, Artificial sequence
  chemically synthesized
agcattgtccgagaggaccagaccctgaaacctggcaaagtcgatgtgaagacagacaaatgggatttctactgccagtg

SEQ ID NO: 259 - DNA, 80 bp, Artificial sequence
  chemically synthesized
ccattctttgggtatgggacattcctctgatcctaatgcagtgatgtatccaacctatggaaatggagatccccaaaatt

SEQ ID NO: 260 - DNA, 80 bp, Artificial sequence
  chemically synthesized
tttgtgttcccttacccatatccatttcgcccacttccaccaattccatttccaagatttccatggtttagacgtaattt

SEQ ID NO: 261 - DNA, 80 bp, Artificial sequence
  chemically synthesized
gaggaggagaccgtggacggacgcaagtgcaggagtttagccacttgggagaatgagaacaagatccactgcacccaaac

SEQ ID NO: 262 - DNA, 80 bp, Artificial sequence
  chemically synthesized
cgcacagggaatggattgttggagagagtaactaggattctagcttctctggattttgctcagaacttcatcacaaacaa

SEQ ID NO: 263 - DNA, 80 bp, Artificial sequence
  chemically synthesized
aagatcaaggccataacccaggagaccatcaacggaagattagttctttgtcaagtgaatgaaatccaaaagcacgcatg

SEQ ID NO: 264 - DNA, 80 bp, Artificial sequence
  chemically synthesized
atgcccagaaggatgtggatgctgtggacaaggtgatgaaggagctagacgagaatggagacggggaggtggacttccag

SEQ ID NO: 265 - DNA, 80 bp, Artificial sequence
  chemically synthesized
tgcgaaatggaagcctgcacatcattgatgacttcgagtctaaattcacgttccattctgtggaagactttccccctccg

SEQ ID NO: 266 - DNA, 80 bp, Artificial sequence
  chemically synthesized
ctgctctttgtctacgcagatgattgccttgctcagtgtggcaaagattgcaaatcttactgctgtgatggaaccacgcc

SEQ ID NO: 267 - DNA, 80 bp, Artificial sequence
  chemically synthesized
tgtaccacgccatcttcctggaagagctgaccaccttggagctgattgagaagattgccaacctgtacagcatctccccc

SEQ ID NO: 268 - DNA, 80 bp, Artificial sequence
  chemically synthesized
gttgggcatagcattgctcttttgcatcctgtttacgctggtctgtggggcttctgggacgtctaaacaaccaaaagtaa

SEQ ID NO: 269 - DNA, 80 bp, Artificial sequence
  chemically synthesized
tggcagcagtaagatcttccctggcaactgggacaaccactcccacaagaagaacttgtttgagacgcccatcctggctc

SEQ ID NO: 270 - DNA, 80 bp, Artificial sequence
  chemically synthesized
caacccaatgacccaggagtctacactcaagtgtgcaagttcaccaagtggataaatgacaccatgaaaaagcatcgcta

SEQ ID NO: 271 - DNA, 80 bp, Artificial sequence
  chemically synthesized
cttctgggggtcacagagcatgttctcgccaacaatgatgtttcctgtgaccacccctctaacaccgtgccctctgggag

SEQ ID NO: 272 - DNA, 80 bp, Artificial sequence
  chemically synthesized
ccatcccatagaagtccagcagacaggatttgttaagtgccagactttgtcaggaagtcaaggagcttctgctttgtccg

SEQ ID NO: 273 - DNA, 80 bp, Artificial sequence
  chemically synthesized
gactacgatgacacagacgatgacgaccctttcaaccctcaggaatccaagcgctttgtgcagtggcagtcgtctatctg

SEQ ID NO: 274 - DNA, 80 bp, Artificial sequence
  chemically synthesized
ttcagcgaattgctctgctgcccaaaagacgttttctttggaccaaagatctctttcgtgattccttgcaacaatcaatg

SEQ ID NO: 275 - DNA, 80 bp, Artificial sequence
  chemically synthesized
gggagacaagcacaagctgaagaaatccgaactcaaggagctcatcaacaatgagctttcccatttcttagaggaaatca

SEQ ID NO: 276 - DNA, 80 bp, Artificial sequence
  chemically synthesized
ctcattcaggtgatgtgctctatgaactccttcagcatattctgaagcagaggaaacctcggattcttttttcaccattc

SEQ ID NO: 277 - DNA, 80 bp, Artificial sequence
  chemically synthesized
aagaaatacagagaaggacagtaatgctgagaacatgaattctcaacctgagaaaacagttactactcccacagaaaaaa

SEQ ID NO: 278 - DNA, 80 bp, Artificial sequence
  chemically synthesized
acaataagaacgggttcaaaatgttcgactcctccaactatcatggccaagacctgcttttcaaggatgccaccgtccgg

SEQ ID NO: 279 - DNA, 80 bp, Artificial sequence
  chemically synthesized
agtcctccatcactttgattcttctagtcaagagtcagtgccaaaaaggagaaagtttagtgaaccaaaggaacatatat

SEQ ID NO: 280 - DNA, 80 bp, Artificial sequence
  chemically synthesized
atgtggtccagcaaggaactgcagggtgtcctcagacagcaaggtttcgataggaacatgctgggaaccttagctggggc

SEQ ID NO: 281 - DNA, 80 bp, Artificial sequence
  chemically synthesized
gaacaactctccagtgaacgggaatagtagctgtcaaatggccttcccttccagccagtctctgtaccgcacgtccggag

SEQ ID NO: 282 - DNA, 80 bp, Artificial sequence
  chemically synthesized
tcatgtgctctcatggaacaacagcattatgtcgaccaaacttcagaatgtttctccagcccaagctacttgagaatatt

SEQ ID NO: 283 - DNA, 80 bp, Artificial sequence
  chemically synthesized
agtaccagccttccaaatgaaactctttcagagttagagacacctgggaaatactcacttacaccaccaaaccactgggg

SEQ ID NO: 284 - DNA, 80 bp, Artificial sequence
  chemically synthesized
gcttgaagaccatggtgagaaaaaccagaagcttgaagaccatggtgtgaaaatccttgaacccacccaaatacctgctc

SEQ ID NO: 285 - DNA, 80 bp, Artificial sequence
  chemically synthesized
tctctattcccagtataagggacgaaactgcgaactccttaaagctctatctagccaaaccgcttacgaccttgtatata

SEQ ID NO: 286 - DNA, 80 bp, Artificial sequence
  chemically synthesized
ttccgcttggagcccaaggatgggaaaggtgtgtttgcagtggatggggaattgatggttagcgaggccgtgcagggcca

SEQ ID NO: 287 - DNA, 80 bp, Artificial sequence
  chemically synthesized
gcagacaagttcctgcagctgtttggaaccaaaggtgtcaagagggtgctgtgtcctatcaactaccccttgtcgcccac

SEQ ID NO: 288 - DNA, 80 bp, Artificial sequence
  chemically synthesized
cttggctgctcctctgacaccatcgaggtctcctgcaacttcactcatggtggacagacgtgtctcaagcccatcacggc

SEQ ID NO: 289 - DNA, 80 bp, Artificial sequence
  chemically synthesized
cccacgcatgagatccgctgcaactctgaggtcaagtacgcctcggagaagcatttccaggacaaggtcttctatgcgcc

SEQ ID NO: 290 - DNA, 80 bp, Artificial sequence
  chemically synthesized
gtccttcgatgaggtcaagcgccttcagaagcagatcctggaggtcaagtcctgcctgaagaacaagaccaaggaggcgg

SEQ ID NO: 291 - DNA, 80 bp, Artificial sequence
  chemically synthesized
aaaccagcaaccatcaaggtctatgactactacctaccagatgaacaggcaacaattcagtattctgatccctgtgaatg

SEQ ID NO: 292 - DNA, 80 bp, Artificial sequence
  chemically synthesized
ggacaatttgcgatgacgagtggcaaaattctgatgccattgtcttctgccgcatgctgggttactccaaaggaagggcc

SEQ ID NO: 293 - DNA, 80 bp, Artificial sequence
  chemically synthesized
tcaacgaagaattgtggcccaatcccttgcagttctaccttttgagtgaaggggctcgtgtagagaaaggaaaggaaaaa

SEQ ID NO: 294 - DNA, 80 bp, Artificial sequence
  chemically synthesized
gatgctttcttctgtattggctgctctcattggaattgcaggatctggctactgtgtcattgtggcagcccttggcttag

SEQ ID NO: 295 - DNA, 80 bp, Artificial sequence
  chemically synthesized
acaataacaagaaaattgaaagatgggaaattagtggtggagtgtgtcatgaacaatgtcacctgtactcggatctatga

SEQ ID NO: 296 - DNA, 80 bp, Artificial sequence
  chemically synthesized
cttcagctgtctgtacccagatggcgtcttctatgacctggacagctgcaagcattccagctaccctgattcagaggggg

SEQ ID NO: 297 - DNA, 80 bp, Artificial sequence
  chemically synthesized
tgccagaacactattcaaccaagtgatggaaaaggagtttgaagacggcatcattaactggggaagaattgtaaccatat

SEQ ID NO: 298 - DNA, 80 bp, Artificial sequence
  chemically synthesized
ctcccggaactggcaggactacggagttcgagaagtggaccaagtgaaacgtctcacaggcccaggacttagcgaggggc

SEQ ID NO: 299 - DNA, 80 bp, Artificial sequence
  chemically synthesized
aaggacgtcaacatcttcagctttctttccaagaaggaagagacctacaacgacctcatcaagcagatcgggaagaaggc

SEQ ID NO: 300 - DNA, 80 bp, Artificial sequence
  chemically synthesized
acatgatagacctacagctctcatcaatggccatttgaattcacttcagagcaatccactactgccagaccagaaggtct

SEQ ID NO: 301 - DNA, 80 bp, Artificial sequence
  chemically synthesized
tctaagtttcttttccttttctgtctgtatctgtttttctctgactgcctatatcttactttgtatacccatacataaat

SEQ ID NO: 302 - DNA, 80 bp, Artificial sequence
  chemically synthesized
gtcatttatcctgcagtgctttgctgcaagataacatcgctgatgctgtagcttgtgcaaagagggttgtccgtgatcca

SEQ ID NO: 303 - DNA, 80 bp, Artificial sequence
  chemically synthesized
catggtggagctgctgctgctgcagaacgcacaggtgcaccagttggtcctgcagaactggatgctcaaggccctgcccc

SEQ ID NO: 304 - DNA, 80 bp, Artificial sequence
  chemically synthesized
cttctctatgtgaagcagcagccttggtattgtgaggtctaccaatacagtgagtgttttctggccaaccaaagcccata

SEQ ID NO: 305 - DNA, 80 bp, Artificial sequence
  chemically synthesized
accgtggtgccagtgcttgctggtgtaggcccactggatccccagagcctcaggcccaactcggaggaggtgagctgggg

SEQ ID NO: 306 - DNA, 80 bp, Artificial sequence
  chemically synthesized
gactgactacaaacaatgcatggccgtgaacttctttggaactgtggaggtcacaaagacgtttttgcctcttcttagaa

SEQ ID NO: 307 - DNA, 80 bp, Artificial sequence
  chemically synthesized
aagtcctatgaaactgctgataccagcagccaaggttccactataagtgttgactcacaagatgaccagatggagtctta

SEQ ID NO: 308 - DNA, 80 bp, Artificial sequence
  chemically synthesized
aacactgatgttcccatcccaacacactactttgtggtgctgaccagttgtaaaaacaagagccacacaccggaaaactg

SEQ ID NO: 309 - DNA, 80 bp, Artificial sequence
  chemically synthesized
gccactgcaagttccactggtgctgctacgtcaagtgcaagaagtgcacggagatcgtggaccagtttgtgtgcaagtag

SEQ ID NO: 310 - DNA, 80 bp, Artificial sequence
  chemically synthesized
ggtgcctacagccagctcaaagtggtcttagagaagctgagcaaggacactcactgggtacctgttagttgggtcaggta

SEQ ID NO: 311 - DNA, 80 bp, Artificial sequence
  chemically synthesized
aatcgtggatggcagattactgtaaagatgacaaggacatagagtcagctaaatcagaagactggatgggctcttcggtg

SEQ ID NO: 312 - DNA, 80 bp, Artificial sequence
  chemically synthesized
acctacctctatgaggacagcaatgtatggcacgacatctcagacttcctcgtctataacaagagccgtccctccaatta

SEQ ID NO: 313 - DNA, 80 bp, Artificial sequence
  chemically synthesized
ccggtcagcgggatcctgttcaataatgaaatggacgacttcagctctcccagcatcaccaacgagtttggggtaccccc

SEQ ID NO: 314 - DNA, 80 bp, Artificial sequence
  chemically synthesized
agcatgaacgccaaggaatgtacgttgagaatcactgctccaggcctgcattactccttcagctctggggcagaggaagc

SEQ ID NO: 315 - DNA, 80 bp, Artificial sequence
  chemically synthesized
aacatccaggataaggaccggatctctgccatgcagagcatcttccagaagaccaggactctgggaggcgaggagagctg

SEQ ID NO: 316 - DNA, 80 bp, Artificial sequence
  chemically synthesized
ccttcccatcgcacaacccaaaaaagttatcacaccggaaagaagtcaccgagcgtctactccagaagtcagtatgtgta

SEQ ID NO: 317 - DNA, 80 bp, Artificial sequence
  chemically synthesized
aactattacatccttaacaccctctaccccaagttcaatgataagttggccgaaggcttcccccttcctctgctgaagcg

SEQ ID NO: 318 - DNA, 80 bp, Artificial sequence
  chemically synthesized
ggagactggtttgaatatgtttcttcccctaactacttagcagagctgatgatctacgtttccatggccgtcacctttgg

SEQ ID NO: 319 - DNA, 80 bp, Artificial sequence
  chemically synthesized
attccgagtggctgcctacaacaaagccaaaaaagccatggacttctatgatccagcaaggcacaatgagtttgacttca

SEQ ID NO: 320 - DNA, 80 bp, Artificial sequence
  chemically synthesized
actattctcttgtttactgccttttgactcggatgaagagacacggaaggggagaaatcattggaattcagaagctgaat

SEQ ID NO: 321 - DNA, 80 bp, Artificial sequence
  chemically synthesized
aaagcttatggctctgtgatgatattagtgaccagcggagatgataagcttcttggcaattgcttacccactgtgctcag

SEQ ID NO: 322 - DNA, 80 bp, Artificial sequence
  chemically synthesized
tggtcttgagagatggcttgctggagaaccagaccccagagttcttccaggacgtctgcaagcccaagtacagcggcacc

SEQ ID NO: 323 - DNA, 80 bp, Artificial sequence
  chemically synthesized
gttgaagatgaaacagtagagcttgatgtgtcagatgaagagatggctagaagatatgagaccttggtggggacaattgg

SEQ ID NO: 324 - DNA, 80 bp, Artificial sequence
  chemically synthesized
ctgtgccaagcccttcaaagtcatctgtatcttcgtctctttcctcagctttgactacaaactggtgcagaaggtgtgcc

SEQ ID NO: 325 - DNA, 80 bp, Artificial sequence
  chemically synthesized
ctaatcttatgaacagtggtgtgagactgaatgccatttgtccaggctttgttaacacagccatccttgaatcaattgaa

SEQ ID NO: 326 - DNA, 80 bp, Artificial sequence
  chemically synthesized
ttggattacaggagatgagagtattgtaggccttatgaaggacattgtaggagccaatgagaaagaaatagccctaatga

SEQ ID NO: 327 - DNA, 80 bp, Artificial sequence
  chemically synthesized
caggcactgaacaatttggggtttaagatttgtccctgtggctggcatcagtggaaatgcacccccaagaaatgttgttg

SEQ ID NO: 328 - DNA, 80 bp, Artificial sequence
  chemically synthesized
catgtcaccacgatctttcctctgcttgagaagaccatggaactggatagctcacttccggaatacaacatgtttccccg

SEQ ID NO: 329 - DNA, 80 bp, Artificial sequence
  chemically synthesized
tgttcgagccgcattctggagaagactacagtcgtgatgaggaccacatcgctcacatagtggagcttctgggggacatc

SEQ ID NO: 330 - DNA, 80 bp, Artificial sequence
  chemically synthesized
catcacatcctcatgcacctcaccgagaaagcccaggaggtgacaaggaaataccaggaaatgacgggacaagtttggta

SEQ ID NO: 331 - DNA, 80 bp, Artificial sequence
  chemically synthesized
tcgctgctgtgtcactcatgactgttgctacaaacgtctggagaaacgtggatgtggcaccaaatttctgagctacaagt

SEQ ID NO: 332 - DNA, 80 bp, Artificial sequence
  chemically synthesized
cctgcactcccgaaagaatatgctgttggccaccaagcaactttgtaaagaatttacggatctactggcgcaggaccgga

SEQ ID NO: 333 - DNA, 80 bp, Artificial sequence
  chemically synthesized
gcacattcaagaacacggagattagtttccagctgggagaagagtttgatgaaaccactgcagatgatagaaactgtaag

SEQ ID NO: 334 - DNA, 80 bp, Artificial sequence
  chemically synthesized
gtccttcaaagctggagtctgtcctcctaagaaatctgcccagtgccttagatacaagaaacctgagtgccagagtgact

SEQ ID NO: 335 - DNA, 80 bp, Artificial sequence
  chemically synthesized
atgaaatggagaacttgctgacctacaagcggagagccatagagcacgtgctgcaggtagaggcctcccaggagccctcg

SEQ ID NO: 336 - DNA, 80 bp, Artificial sequence
  chemically synthesized
atggaggacctggacacaaatgcagacaagcagctgagcttcgaggagttcatcatgctgatggcgaggctaacctgggc

SEQ ID NO: 337 - DNA, 80 bp, Artificial sequence
  chemically synthesized
agcttctccagcagtgcgggtcctgggctcctgaaggcttattccatccggaccgcatccgccagtcgcaggagtgcccg

SEQ ID NO: 338 - DNA, 80 bp, Artificial sequence
  chemically synthesized
agtggtgcactcttctttatcatctcagacctgaccatcgccctcaacaaattctgttttcctgtgccctactctcgggc

SEQ ID NO: 339 - DNA, 80 bp, Artificial sequence
  chemically synthesized
ctgtctcttacacggtagcaccctttgtgatgttggcagttgaaccgaccatcagcttatacaagtccatgtacttttat

SEQ ID NO: 340 - DNA, 80 bp, Artificial sequence
  chemically synthesized
tcctgtgctgctgtctggttgagagcctgccaccgtgtgtcgggagtgtgggccaggctgagtgcataggtgacagggcc

SEQ ID NO: 341 - DNA, 80 bp, Artificial sequence
  chemically synthesized
cctgctctggatcatcgaactgaataccaacacaggcatccgtaagaacttggagcaggagatcatccagtacaacttta

SEQ ID NO: 342 - DNA, 80 bp, Artificial sequence
  chemically synthesized
tgatggggagaatgtgaaaattccagtggccatcaaagtgttgagggaaaacacatcccccaaagccaacaaagaaatct

SEQ ID NO: 343 - DNA, 80 bp, Artificial sequence
  chemically synthesized
attgaggccatccgaagagccagtaatggagaaaccctagaaaagatcaccaacagccgtcctccctgcgtcatcctgtg

SEQ ID NO: 344 - DNA, 80 bp, Artificial sequence
  chemically synthesized
ctcgatgcacacactggtatatcccatgaagacctcatccagaacttcctgaatgctggcagctttcctgagatccaggg

SEQ ID NO: 345 - DNA, 80 bp, Artificial sequence
  chemically synthesized
cctgacatggactatgaccctgaggcacgaattctctgtgcgctgtatgttgttgtctctatcctgctggagctggctga

SEQ ID NO: 346 - DNA, 80 bp, Artificial sequence
  chemically synthesized
tcgtgctgtacttcctcaccagcttctacactaagtacgaccagatccattttgtgctcaacaccgtgtccctgatgagc

SEQ ID NO: 347 - DNA, 80 bp, Artificial sequence
  chemically synthesized
acgatgtgcagccttcgaagttgatgcgactgctgagctctaatgaggacgatgccaacatcctttcgagccccacagac

SEQ ID NO: 348 - DNA, 80 bp, Artificial sequence
  chemically synthesized
tgtatcacatcacttctcaagtattccttcattgggcttcatccttttagcagaactcttggtggtgggatagagactta

SEQ ID NO: 349 - DNA, 80 bp, Artificial sequence
  chemically synthesized
atgaagatcggaagaatccagcatacatacctcggaaagggctcttctttgagcatgatcttcgagggcaaactcaggag

SEQ ID NO: 350 - DNA, 80 bp, Artificial sequence
  chemically synthesized
tgtccggtctttcttggatgattttgagtcaaagtattccttccatccagtagaagactttcctgctccagaagaatata

SEQ ID NO: 351 - DNA, 80 bp, Artificial sequence
  chemically synthesized
acatgactctaagtaacctctgtgaccctcagttgaaaccagaagagagagaatcttgtaaccctcaggactgtgtccct

SEQ ID NO: 352 - DNA, 80 bp, Artificial sequence
  chemically synthesized
accttcctctcctaaacacgtctcttctgtcacttcccgaactggcagttctggagcaaaggagatgaaactcaaggggg

SEQ ID NO: 353 - DNA, 80 bp, Artificial sequence
  chemically synthesized
tgctggctcggttatcagactctcatccaacacaagctcacagggaaagccgttccttgctccttgtggagggagctacc

SEQ ID NO: 354 - DNA, 80 bp, Artificial sequence
  chemically synthesized
gcatctgagcagtgaggagatgatgagagaatgtggagatgtgtcaagggctcaagaggagctaaggaaaaaacagaaaa

SEQ ID NO: 355 - DNA, 80 bp, Artificial sequence
  chemically synthesized
aattcttcgaggacattttacagccagagacagagtttgtctttcctctgtcccatctgcatctcgagtcgcagagaccc

SEQ ID NO: 356 - DNA, 80 bp, Artificial sequence
  chemically synthesized
ccaggtgcaggatatcgtcaagccaaacacagcacatacattcatcataacaggaagaaaaaggtccctggagctgcaga

SEQ ID NO: 357 - DNA, 80 bp, Artificial sequence
  chemically synthesized
gtctcggtgcttccagccacataaccacaaaatcaatggctgctcctccaagctgtggtctgagcccactgctggtcctg

SEQ ID NO: 358 - DNA, 80 bp, Artificial sequence
  chemically synthesized
ctgggcactatggaggtgaagagcaagtttggagctgaatttcgtcggttttcgctggaaagatcaaaacctggaaaatt

SEQ ID NO: 359 - DNA, 80 bp, Artificial sequence
  chemically synthesized
gtgcaggttcagtgtgagcagaactggggaagcctgtgctccatcttgagcttctgcacctcggccatccagaagcctcc

SEQ ID NO: 360 - DNA, 80 bp, Artificial sequence
  chemically synthesized
ctgttgctgtgttctgtcatgagttgcctcatgaattaggtgactttgctgttctactaaaggctggcatgaccgttaag

SEQ ID NO: 361 - DNA, 80 bp, Artificial sequence
  chemically synthesized
caatatcaccgccatgccacacaatggatcattctggaatgtccaggatctgctcaattcagcaatgccaagggtggtcc

SEQ ID NO: 362 - DNA, 80 bp, Artificial sequence
  chemically synthesized
tcgctgtccttgcggaatccacacactttgggcctaagccggtaccacccctatggcaagagccacttatccacagcggg

SEQ ID NO: 363 - DNA, 80 bp, Artificial sequence
  chemically synthesized
gcaagtaaagaagaggcaaccacgttctccaatgcaatgctgtttgccctgaacatcatgaattcccaagaaggaggccc

SEQ ID NO: 364 - DNA, 80 bp, Artificial sequence
  chemically synthesized
ggtgcagatgatggctttgttacggtgagcctaaagccagacaaagggaagagagcaaattcccaagaaaatcgtaatta

SEQ ID NO: 365 - DNA, 80 bp, Artificial sequence
  chemically synthesized
cgctgaaacacgtccatttggagaacaaccgcttgaaccagctaccctcgaacttccccttcgacagcctggagaccctc

SEQ ID NO: 366 - DNA, 80 bp, Artificial sequence
  chemically synthesized
tggcctttcattgtgatctctgatgactcctgcgtgatgtggaacgtggtggatgtcaactctgctggggagagaagcag

SEQ ID NO: 367 - DNA, 80 bp, Artificial sequence
  chemically synthesized
ataatcagcaatgatgtctgcaatggcgctgacttctatggaaaccagatcaagcccaagatgttctgtgctggctaccc

SEQ ID NO: 368 - DNA, 80 bp, Artificial sequence
  chemically synthesized
cggtgatggtattttgcccaggcaacagtacttcaaacagaactgcagtcagcatgaatccagtccagatatttcacatt

SEQ ID NO: 369 - DNA, 80 bp, Artificial sequence
  chemically synthesized
ccagcttctgcagtttctgttttgaagagccagcacttacggcagaaacttcttcagtctctgtttcttgataaagtgta

SEQ ID NO: 370 - DNA, 80 bp, Artificial sequence
  chemically synthesized
cacaggattcctgtgggtccagctttggaactgggaaacctttcttcggatccgcactcattccactgatgccagctgcc

SEQ ID NO: 371 - DNA, 80 bp, Artificial sequence
  chemically synthesized
tctacattctggttgtcatgtccttctacggcattttcttgatcggaatcatgctgggctacatgaaatccaagaggcgg

SEQ ID NO: 372 - DNA, 80 bp, Artificial sequence
  chemically synthesized
tggtggagatcttcgacatgctgctggctacatcatctcggttccgcatgatgaatctgcagggagaggagtttgtgtgc

SEQ ID NO: 373 - DNA, 80 bp, Artificial sequence
  chemically synthesized
atgaagaatttcttcattctgatctcctagaagacagcaaataccgaaaaatctactcctttactcttaagcctcgaaca

SEQ ID NO: 374 - DNA, 80 bp, Artificial sequence
  chemically synthesized
ctgagcactgctctccgtgacccacactactttgaaaaaccagacgccttcaatcctgaccactttctggatgccaatgg

SEQ ID NO: 375 - DNA, 80 bp, Artificial sequence
  chemically synthesized
aaaatgggagttttctgttccatttcatcaggctctgaatggcttccatcctgcaccactctgtaccataagaacattaa

SEQ ID NO: 376 - DNA, 80 bp, Artificial sequence
  chemically synthesized
tttgggctcttcgctggccttggtggagctggtgccagcaccagtggcagctctggtgcctgtggtttctcctacaagtg

SEQ ID NO: 377 - DNA, 80 bp, Artificial sequence
  chemically synthesized
accagacggaaaacccgtttctgtgcacagtggttgccatcctcctccactacatctacatgagcacctttgcctggacc

SEQ ID NO: 378 - DNA, 80 bp, Artificial sequence
  chemically synthesized
tggagacttcatcctgggctactatagtcacaaccacagcatcctcatcggcatcactgaacccttccagatctcgctgc

SEQ ID NO: 379 - DNA, 80 bp, Artificial sequence
  chemically synthesized
tgagcagcaagcgaatcaccatcaacaagattctgtccaacgagagccttgtgcaggagaacctgtacttccagcgctgc

SEQ ID NO: 380 - DNA, 80 bp, Artificial sequence
  chemically synthesized
ccctctggatgagtccgagagagatggaggctctgaggaccaagtggaagacccagcactaagtgagcctggggaggaac

SEQ ID NO: 381 - DNA, 80 bp, Artificial sequence
  chemically synthesized
aaggcaatggctgtgccctatcttctgagaagaaagttcagtaattccctgaaaagtcaaggtaaagatgatgattcttt

SEQ ID NO: 382 - DNA, 80 bp, Artificial sequence
  chemically synthesized
ctcggagcagcagcataagctggacttcaaggcatacgaacaggcactgcaatactcgccttacggctctacgttgcccg

SEQ ID NO: 383 - DNA, 80 bp, Artificial sequence
  chemically synthesized
cagattcagagtctgatatcctgttgggcattctggacaacttggacccagtcatgttcttcaaatgcccttccccagag

SEQ ID NO: 384 - DNA, 80 bp, Artificial sequence
  chemically synthesized
aatgtctagcaaatccaaaaagtgcaaaaaagtgcatgactcactggaggacttccccaagaacagctcgtttaacccgg

SEQ ID NO: 385 - DNA, 80 bp, Artificial sequence
  chemically synthesized
gggcatctatggccagtatcaactccttggcatcaagagcattggctttgaatggaattatccactagaggagccgacca

SEQ ID NO: 386 - DNA, 80 bp, Artificial sequence
  chemically synthesized
tgggcaagtatattctgctcatcaaatggtcattggctatgtactttgtgcagggaagtacattatctacagtcacaaaa

SEQ ID NO: 387 - DNA, 80 bp, Artificial sequence
  chemically synthesized
cctttactgcccctgcttaacacggtcaagttcctgctgcttttctacctgaagaagcttaccctcttctccacctgctc

SEQ ID NO: 388 - DNA, 80 bp, Artificial sequence
  chemically synthesized
tatgcttacgaacctgcagatacagctctgttgcttgacaacatgaagaaagctctcaagttgctgaagactgaattgta

SEQ ID NO: 389 - DNA, 80 bp, Artificial sequence
  chemically synthesized
ccaggatccctggagtgccttggtgtttcaagcccctgactaggaagacagaatgcaccttctgaggcacctccagctgc

SEQ ID NO: 390 - DNA, 80 bp, Artificial sequence
  chemically synthesized
tgccatagatgaattgaaggaatgttttcttaaccaaacggatgaaactctgagcaatgttgaggtgtttatgcaattaa

SEQ ID NO: 391 - DNA, 80 bp, Artificial sequence
  chemically synthesized
gcttctaccactgctcgtaaagacattccagttttacccaaatgggttggggatctcccgaatggtagagtgtgtccctg

SEQ ID NO: 392 - DNA, 80 bp, Artificial sequence
  chemically synthesized
acctgttcaaggtgcagcgatactgtgagaagagcatgatcagcagaaagctctttggattcactgaacggtacggagca

SEQ ID NO: 393 - DNA, 80 bp, Artificial sequence
  chemically synthesized
cagctcatcactgttgaaaaggctttggcaattctttctcagcctacaccctcacttgttgtggatcatgagcgattaaa

SEQ ID NO: 394 - DNA, 80 bp, Artificial sequence
  chemically synthesized
catccagagaaagcaccttatgagtggaagaatttggatggcatttcccatgcacctaatgctgtgaaaaccgcatttta

SEQ ID NO: 395 - DNA, 80 bp, Artificial sequence
  chemically synthesized
accctgagactcccagatcttcaggttctatgcgcaatagatggaaaccaaacagcagcaaggtactagggagatccccc

SEQ ID NO: 396 - DNA, 80 bp, Artificial sequence
  chemically synthesized
agcactctacacagtcacgggacaaagctggcctgaatcattaatacgaaagactggatataccctggaaagtcttaagc

SEQ ID NO: 397 - DNA, 80 bp, Artificial sequence
  chemically synthesized
gaataagtatgcaagcagcaaactcctgaagatcagcatgatccctcagctgaactcaaaagccgtcaaagaccttgcct

SEQ ID NO: 398 - DNA, 80 bp, Artificial sequence
  chemically synthesized
ctctgtgttaccaagaactggctgtctgcagatactaaagaagagcgggatctctggatgcaaaaactcaatcaagttct

SEQ ID NO: 399 - DNA, 80 bp, Artificial sequence
  chemically synthesized
gctgccgagctctggaaaaaccccacagcttttaagaagtacctgcaagaaacctactcaaagcaggtcaccagccagga

SEQ ID NO: 400 - DNA, 80 bp, Artificial sequence
  chemically synthesized
tgggttcattacatgattcatgagccagaaccacatattcttctctttagacgacctcttccaaaagatcaacaaaaatg

SEQ ID NO: 401 - DNA, 80 bp, Artificial sequence
  chemically synthesized
agcctgcagcaagcactttggagagcaaatctgtgcagagagtaacgcggagtgtcaagaggtgtgcagaaaatccaaag

SEQ ID NO: 402 - DNA, 80 bp, Artificial sequence
  chemically synthesized
gaaggcctggtcctggacacaatgaatgacagcctcagcaagatcctgctggacatcagctttcctggcctggacgagga

SEQ ID NO: 403 - DNA, 80 bp, Artificial sequence
  chemically synthesized
gacagagaagcatgcaagacagaaacaaaaggctgatgaggaagagatgcttgataatctaccagaggctggtgactcca

SEQ ID NO: 404 - DNA, 80 bp, Artificial sequence
  chemically synthesized
gaatggtttctgcataccctcgacagctagagtcattaatccgcttagcagaagcccatgctaaagtaagattgtctaac

SEQ ID NO: 405 - DNA, 80 bp, Artificial sequence
  chemically synthesized
taagagatcattatccttgtgtgtcttcattggaacagctaacggagttgggaagagaaactgatgcttttgtatgccgc

SEQ ID NO: 406 - DNA, 80 bp, Artificial sequence
  chemically synthesized
ggactgcagagaaggaactcctctgaagcaagctccggagacttcttagatctgaagggagaaggtgatattcatgaaaa

SEQ ID NO: 407 - DNA, 80 bp, Artificial sequence
  chemically synthesized
ctgtagaggaagaggaagatcaaaacgttgtaccagaaactacctctgaaggctacactttccaagttcaggatggggct

SEQ ID NO: 408 - DNA, 80 bp, Artificial sequence
  chemically synthesized
ggcttctgaactggaattctgcagctaacccttccacgactagaaccttaggcattggggagttttagatggactaattt

SEQ ID NO: 409 - DNA, 80 bp, Artificial sequence
  chemically synthesized
atctcaggactctaaatactctaacagctgtccagtgttggtgattccagtggactgtatctctgtgaaaaacacaattt

SEQ ID NO: 410 - DNA, 80 bp, Artificial sequence
  chemically synthesized
catttggagtataggcaccatatttgctgaactagcaactaagaaaccacttttccatggggattcagaaattgatcaac

SEQ ID NO: 411 - DNA, 80 bp, Artificial sequence
  chemically synthesized
tccaatctgttgcagtctccttcaagcattctgtcgaccctggatgttgaattgccacctgtttgctgtgacatagatat

SEQ ID NO: 412 - DNA, 80 bp, Artificial sequence
  chemically synthesized
cgcccaccaagaaggaacatcagaaagcctgggctttgaacctgaacggttttgatgtagaggaagccaagatccttcgg

SEQ ID NO: 413 - DNA, 80 bp, Artificial sequence
  chemically synthesized
gaggaagaccaaaaagtcatcgagctggttaagaagtatggcacaaagcagtggacactgattgccaagcacctgaaggg

SEQ ID NO: 414 - DNA, 80 bp, Artificial sequence
  chemically synthesized
tttgtggcagacagacttatgctggaactgggttttagcaaggttttcagagtagagaacccatttgactttatggagaa
